United States Patent Application Publication US 2009/0144849 A1 - sequence listing, part 2

SEQ ID NO: 2604 - DNA, 2463 bp, Arabidopsis thaliana
  Clone ID: AT_MJJ3.C1.o6.tg
atgactaatatggccggaaccgccaccaccgagttccggtggaaatcaccaccacagcctccgtcacaagagcaacccatttcagattcagattcagactccggatctgattcagagaatcatcagcaccgtcacaatgatctatcaaactccatcttcgaagcttacctcgattgccactcatcttcgtccccttcctcaatcgatctcgctaagatccaatcttttctcgcctcgtcttcttccggtgctgtctcgtgccttatctgtctcgaacgcattaaacgaaccgatcctacatggtcctgcacttcctcatgcttcgccgtctttcaccttttctgcattcaatcatgggctcgtcagtgcttagatctacaagccgcgcgtgcagtcacgcgaccttcttcgaatccgacagaaccggaagctgtctggaactgtccgaaatgtagatcgtcgtatcagaaatcgaagattccaaggcggtacctttgttactgcggcaaggaagaggatcctccggcggataatccatggatcttgcctcattcttgcggcgaggtctgcgagaggccgttgagcaacaattgtggtcactgttgcttactcttgtgtcaccctggaccttgtgcttcttgtcccaagctcgtgaaagctaaatgcttctgcggcggtgttgaagatgttcgtcgatgtggacacaagcaattctcttgcggagatgtctgtgagagagtcctggattgtaatatccataactgtagggagatttgtcatgatggcgagtgtccaccttgcagggagcgcgcggtttacaagtgctcttgtggtaaagtgaaggaggagaaggattgctgcgagagagtctttaggtgtgaggcttcttgcgagaatatgcttaattgcgggaaacatgtatgcgagagaggatgccacgcgggagaatgtggattgtgtccatatcaggggaagaggagttgtccctgtggcaagagattctaccaaggcttgtcttgtgatgttgtggcgcctttatgtggtggcacttgtgataaagttcttggttgtggctaccataggtgtccagagaggtgccaccgcggtccgtgccttgagacttgcaggattgtagttaccaagtcttgcaggtgcggagtaacgaaaaaacagatttgggacgatatgactaataaaattgtgtactgcaagatatcaactcatgcacgtggaatgacattatttgttgcgtgttcattgcagaggtccatgtgctccttgtccaataatggtaacaatatcttgtgcttgtggtgtcatggacctagacctcctcctaaccgtgaatttatactgaaaccaacgaaaaagatgttgcatattcaggctgaatctacaccgggttctccctgccctcgttgtccagagcctgtctggaggccctgtgtaggccaccacctggcagcagagaaaaggatgatttgctctgacagaactcaatttgcatgcgataatttatgtggaaaccctcttccatgtgggaaccattactgttcgtatttctgtcatgccctggatataagaagttcatcattggataaaagaagtgagtcctgtgaaaagtgtgatctccgctgtcaaaaggagagaacaccacgatgccaacatccatgtcctcggcgatgccatcctgaagattgtccaccttgcaaaactctagtaaagagatcatgtcactgtggcgcgatggtgcatgcattcgagtgcatatactacaatacaatgtcggagaaggaccaaatgaaggcgcgctcatgccgtggaccttgtcacagaaaattgccaaactgtacccatttgtgtccggagatatgtcatcctgggcagtgtccattgccagagaagtgtggtaaaaaggtatccatttgccagtttatatccatttgggatgctgtatctgttacaagtgagatcttacttgtctcgattttatcatggatcaaggtggttgttcgttgcaagtgcctaaccttgaagaaagaatgggtatgccaggatgttcaagcagcccatagggccacaggttctgatcctaaagaagtaccaaagaaccagttcggggttggcctcctcccttgtgattccaactgtaagagcaaactacaggtggctgaatcggtgttaacacagcgcaatgtcaaagagattgaggagaaggaggagcctagcgggaaaaatgcatcaaagcgaaggaaaaggcgtggacggggtcaggacattcaggagaccacaaggctgcagaaacttgctgtcaccacaaagaggatactgatggtcgtgatgttagtggcgatgctagctgctgtttcatactatggctataagggactcttgtggctttcagattggatgaatgaagtcgaagaacaaagacaaaagtctagaagataccctcgaatctaa

SEQ ID NO: 2605 - DNA, 1077 bp, Arabidopsis thaliana
  Clone ID: AT_YUP8H12R.C1.o32.tg
atggccgtcgatgctcaccatctctttctttctcctcctcaactcttctccaacagagaattaacgatgaataataacactatggaaccaactagtggcggtttctgcaataacaatcaaaccggttacggcgtcgtttcacctttctccgttccaaaccatacatcaacaacaacaacagcaacgcctcctcttcttcatgtgtacggcggctctgatactattcccaccaccgccggttactacgccgatggtgctactaatctcgactgtgaatttttccctttaccaacgagaaaacgctcaagagattcttcaagatcaaattatcatcatcttcttcttcagaacccgagatcatcatcatgtgttaacgctgctactacaacaactacaacaactctgttctcgtttcttggccaagacattgatatctcctctcacatgaatcaacaacaacacgaaatagatcgattcgtctcccttcacttatatcagatggagagagtgaaatatgagatagaagagaagaggaaaagacaagcgagaacgataatggaggcgatagagcaaggactggttaaaaggcttcgtgtcaaagaagaagaaagagagaggatcggcaaggttaaccacgcgcttgaggagcgagtgaagtcactttctatagagaaccaaatctggagagaccttgctcagacgaacgaagccacggctaaccacctccgaaccaacctcgagcatgttctggcgcaggttaaggacgtatcacgcggcgcaggattagagaaaaacatgaacgaagaggacgatgcggagtcgtgctgcggaagcagctgtggtggtggtggtgaagaaacggtaaggcgcagggtaggattagaaagggaggcgcaggataaggcggagaggaggaggaggaggatgtgtagaaactgtggggaggaggaatcgtgtgtgttgctgttaccgtgcagacacttgtgcttgtgtggagtatgcgggtccagtgtgcacacgtgtcccatctgtacatctcctaaaaacgctagcgttcatgtcaacatgtcatcttga

SEQ ID NO: 2606 - DNA, 3156 bp, Arabidopsis thaliana
  Clone ID: AT_F28A23.C1.o140.tg
atggagatttccccggccgattcgttgtccatctctggcgcggctgcttctgaggtcgtctccgagccttccgtatcttcttcttcttcctcttcctcgccgaatcaggcatcacccaatcctttctcaaacatggatcctgcagtttcgacggcgacaggatcgaggtacgttgatgatgacgaagatgaagaggacgtttgcaggatctgcagaaatcctggtgatgcagacaatccgcttcggtatccgtgtgcctgtagcggaagtatcaaatttgttcaccaggattgtctccttcagtggcttaatcacagcaacgctcgtcaatgcgaggtttgcaagcatcctttttcattctccccagtatatgctgacaatgctccgtcaaggctccctttccaggagtttgtagttggcattgctatgaaagcttgccatgttttacagttctttctgcggttgagttttgtgctttctgtctggcttctcactatacctttcattacattttggatatggcgtttggctttcgtgcgaacttttggtgaagctcaaaggttgttcttaagccacatctccaccacagtaattctcactgattgcttgcatggggactactttaggcacttacgagagcttgggggacaagaagagagagatgatgatgtggacagaaatggtgctcgtgctgcaagaagacctgctggacaggctaataggaatcttgctggagaggggaatggtgaagatgctggggatcagggtgctgcggttggtcagattgctagaaggaatcctgaaaatgttctggcaaggttggacatacaagcagctcgtcttgaggctcaggttgaacagatgtttgatgggttggatgacgctgatggtgcagaagacgttccatttgatgagctggttggaatgcaaggtccagtgtttcatttggttgagaatgcctttactgttctagcaagcaatatgatattccttggtgttgttatcttcgtgccctttaccttgggacggattatattgtatcacgtgtcatggctttttgctgctgctagaggccctgctgtggctgcatcattgcatcttacagataccggactctcattggaaaatattactctgaagagtgcgctgactgctgtctcgaatttgactagcgagggccaaggaaatgggctgcttggtcagctcactgaaatgatgaaagtcaacggaagtgaattgaatggagcaaacaatacgctatcagttgctactgatctcctgaaaggttctactgttggggcctcaaagctttctgatattacaactctggctgttgggtacatgtttatcgtatttctggtgttcctttaccttgggatcattgcactgattcgatatgccaaggaagctgtaccatccctccttagacagttcttggcagcaatgaggcatctgatgaccatgatcaaagttgcctttcttttggtcatcgagcttggggtctttcctctgatgtgtggttggtggctagatgtttgcactgttaggatgttcggtaaaacaatgtcccacagggtacagtttttatcaatttctcctctggcaagctcacttgttcattgggttgttggaatcatgtacatgttgcaaataagcatcttcgtcagccttcttcgaggggttcttcgtcctggagttctgtatttccttcgtgatccagcagatcctaattacaatccattccgagatttgattgatgatccagtgcacaagcatgctcggagggtactgttatcagttgcagtgtatggaagtttgattgtgatgctggtatttttaccagtcaaacttgcgatccggatggctccttcaatctttccacttgacatatctgtatccgacccattcactgagattcccgccgacatgcttctgtttcaaatatgcattccatttatcatcgagcatttcagacttcggaccacaattaagtcccttctacgctgctggttcactggggttggttgggcgcttggtttaacagacttcctcttgccaagaccagaagacaacattggtcaggacaatggaaatggtgaaccaggaaggcagaacagagcacaagtgttgcaggtcggaggacctgacagggccatggctgcgcttccagtagctgatgaccctaacagaagtcgcctccgtgctgggaatgtcaacacgggtgaggaatatgaagatgatgacgaacaatctgattctgagtacaactttgtggtccggataattctccttctacttgttgcatgggtgactcttcttctcttcaattcagcattgatagttgtgccagtttcgctgggacgtgctctattcagtgccattcccattcttccaataactcatggcatcaagtatgctatcgagcatgtcaagtcaaagaggacttcagtcttgcttaaccaaatatggaaatggtgtgggattgtattcaagagctcggtgctgttagccatatgggtttttatcattccggtgctaattggacttctgtttgagcttttggtgattgtcccaatgagagtcccagttgatgaaagccctgtgttcctcctgtatcaagactgggctcttgggctcatctttttgaaaatctggactagactggtaatgctggatcatatgcttccaatagtggatgatagctggagagcaaagtttgagcgggtaagagaagatggcttctcgaggcttcaagggttatgggtacttagagagattgtgttcccgatcgtcatgaaactcctaacggctttatgcgtgccttatgtgttggcaagaggagtgttcccaatgctcggatatccgcttgttgtgaactcagcggtctacagattcgcgtggataggttgtctttcagtgagcctcttctgcttctgtgcaaaaagatgccatgtctggtttagaaaccttcacaactctatccgtgatgaccgttatctcattggtcggagactgcataactttggggaagctgctttagctaatcaaaaccaaaaccaaagtagtgaggatgcaggagatggtgtcttgataggacgagagggagatgttgataatggacttaggctcagacgtgcaatccaacaagaagcttag

SEQ ID NO: 2607 - DNA, 681 bp, Arabidopsis thaliana
  Clone ID: AT_MBK5.C1.o22.tg
atggagaacgatcaacaaggatcgtacttgagagatgaggataaggaagagatggagaaaaggatcagaaccgttgtcattgattcgaatctagttttatctaattcaacttgtggtatttgccgtacggctgaagatgaatatattaaggtttatgatgatcataacaatgatggtgagggtgatggtgatggtgatggtgatggtgatgaggatgaggatgaggatgcggatgcggatgaggacgaggacgaggacgaggacgaggatgatgatgatgatgatgatgatgatgatgatgatgatgctgatgatgctgatgatgatgaagatgatgatgacgaggatgacgatgaagatgaggatgatgatgatgatgatgatgatgaaaatgatgaagagtgcgatgatgaatatgatagtcatcgtttaatctccacaccctattgtactcacaagttctgcaaaacttgttggagggagtacctagagacaaatttctactctctggaggaaaacttaaccgtaatctcatgtcctgatcaagattgtggagcttcggttagactaaaaacgattgagaaactaggagtacatgatcaagacatgtacttgagttatgttatgagagtttacattgagaatgagagcaaacagctccctgcaccggatgacaactag

SEQ ID NO: 2608 - DNA, 1245 bp, Arabidopsis thaliana
  Clone ID: AT_F4H5.C1.o13.tg
atgatgattaaggtgaagaaggagacgatgagggcatgcttaagctgctctatctgcgacaatatcctccgtgacgccaccactatctccgagaaatgcatctatgagaagatcacggaggatgagatagagacttgtcccgtatgcaatatcgacctcggtagcaccccattggagaagctgaggcctgaccacaatttgcaagacttgagggccaaaatctttgctctaaaacgaagaaaagtgaaagctcctggaattgtgtccttaccaggaaagaggaaggagagatctatatcttctttggttgtgagcacacctatggtgtcagcacaagctggaacaacgagaagaagaactaaagcacctacaagaaaagagttacgtaatggttctttggctgagagaactgtgaagaaggaagaatcttctggggatgagcttctggagagcacaagctcacccgacactcttaacaaattcactcagaataaaagacagtcaaagaagtcatgtaaagagtccatctccaataaagaaaacaaggatggtgatgaaccctgggattccaaaatggattggaaacctttgaactttctggttgaagtggcaaatgggacaaagcccttgaagtcttctgcttctcaagggtcaggttcaaaatctgagcacgcgaatgtatctcgcaatcaatttcaagggagtaaaaccaaaactaagaataaaaagagaaaatgtaaacgtgaggatgacaagagtaataatggtgatcctacaacatcagaaactgttactcctaaaagaatgcgtacaactcaacgcaaaaggtctgccaccactttaggcgattcaaggaatttgccacaaccagatgagtcaagtgcaaaacaggagaggagaaatggtcccgtttggttctcacttgtggcgtccaatgatcaggaaggaggaacttctttacctcaaattccagcaaattttttgagaataagggatggaaatacaacagtttctttcatccaaaagtacctcatgaggaagctagatctcgagagtgaaaatgagatagagataaagtgtatgggagaagcggtgatcccaacgctgacgctttacaatttagtggatctatggctccagaaaagttcaaaccaccaacggtttgctgcattggtaggttcttctgcaaaggattttacgatggttcttgtctatgctcggaagctaccagagtgcaacatgtaa

SEQ ID NO: 2609 - DNA, 825 bp, Arabidopsis thaliana
  Clone ID: AT_T15F16.C1.o1.tg
atggggagaactaaggagcaggcaacattaactcggtatccaccctgtcctaggaatcctgctaaattcaatgatataaacaaagcactccaggaaaaaggatatggtaaggctctgaaaagaaaaccttggacgggtgtgacatgccctgtctgtcttgaggttcctcacaactcggtcgtcctcctttgttcatcttaccacaaaggatgccgtccgtacatgtgtgccacgggaaaccgtttctcaaattgtctagagcagtacaaaaaggcatatgccaaggatgagaaaagtgacaaaccgccagagctattgtgcccgctttgtaggggtcaggtgaaaggctggaccgttgtggaaaaggaacgtaagtatctgaattctaagaaaaggtcatgcatgaacgacgagtgtttgttttatggaagctatagacagctcaagaagcatgttaaggagaaccatccgagagccaagccaagagccatagaccctgtgctggaggcgaaatggaagaagcttgaggttgagagggagaggagtgatgtaatcagcacagtcatgtcgtcaacacctggggctatggtatttggagactatgtgattgagccatacaatggttatgatcatcaagatgacagtgacgattacagtgattcgtcggatgacgaaatggaaggtggggtattcgagcttggagcattcgacctgggccgtcttcaaccgcgttcggctgccatctcaagccggggaattcgcggtatgatcataaggaaccggtgggctcgaagcagaggtgcgagcagaaggcgacaaacataa

SEQ ID NO: 2610 - DNA, 795 bp, Arabidopsis thaliana
  Clone ID: AT_T32E8.C1.o10.tg
atggggaaaatcaagaaagtgaatcaaaggggtcatattgctacaccgtatccatcaccatgttgtaagaaagaatgggctggctcaacctgtccagtatgcttggagtctccacacaatgcggttcttctcctgtgttcgtcttatcacaaaggatgccgtccttacatgtgtgctacaagcagccgttttgccaactgccttgatcaatacaggaaatcctacggtaacgaaaactcaggacaacccgagcttttgtgtccactgtgtagaggtcaagtgaaaggctggactgttgtgaaagatgctcggatgcattttaactccaagagaaggacttgtatgcaggataactgttcctttttaggaaatttccgaaagctcaagaaacacatgaaggaaaaacacccacatgcttgcccaagagccattgatccagctttagaaactaaatggaagaggcttgagagggaaagagacagaagagacgtgataagcacgataatgtcatcgacaccaggtgctgttgtgttgggagattatgtgatagagccgcataaccgaggtgtttatgatgaagaagacgaagaagaagattacagctcagatgactctctaagcaacgggatactggatctagaatcatcatggcaaggacaaagccatcatattcggtttcttgatatggaatcaagtgacttcgcatcctcttccagctcccctgcttctccaagccgttcgcttcaccgtttgctctttccaaggaaccagagaggcggcaatagaggtcggtaa

SEQ ID NO: 2611 - DNA, 870 bp, Arabidopsis thaliana
  Clone ID: AT_F9E10.C1.o28.tg
atggttgctgtcacagactctgaactctttcatggctctccgatttcaacagatttctccaagaaacgcaaggcgaattggttttgtaagctgaagcagtggaagattgatgctcgtcgcaaacaatggatttctcaatggaaaaaagcaaatgtagatgaagaagaaattggacgtagattgagatctttgttagagaaactgactgatcaaaaagcttggaggattgattatgatgatgatgaggatgatgagattgatcttgaaaggacatcatcatttgctagtagtcccacgagtgttctcaagaggaaagattctgttagtggtgattgcttttgttgttctaagcagatgactgaggaagaggaagaagtttttgacgatgcttatgataactgggatgggtttaaagatgcgttaaactcctttgagaatgataacaacgaaagctctcgacttgtgacagaagattttgagcaagaagaagaagatctgattccagatacaagccagaggatgaacaagtgcaagcaagaagctgcacctggaaatcagacgacgattcacagaaacagtaataagaagaagaggtctaactctgagaagcaaagaggtgatggtgatgaagaatgtcctatttgctctgagttgatggatgcaacggatctagaattcgaaccatgtacttgtgggtttcggatttgtctcttttgccataacaagatcagtgaaaacgaagcacgttgtccagcttgcaggaaggattataaaaagacgagtaaaaaaagtggagaagtaggttatcagcaacgtggtcgtggcactattcccttgtctccgtcgtttagaggacttgacagagcttaa

SEQ ID NO: 2612 - DNA, 831 bp, Arabidopsis thaliana
  Clone ID: AT_K18L3.C1.o70.tg
atggtgctagcttcaatttcggaagctttgatatctcaaggtgatggaggggagagagtggctaagagacaacgctcggcgatagtactgctagatcttgatatcctcgattgtcctatttgctgtgaagcattgacgagtcctatcttccagtgtgataatgggcatttggcttgcggttcttgctgtcccaaactgagtaataagtgccctgcatgtactttgcctgttggtcacagtcgcagcagagcaatggagagtgttcttgaatctattttgatcccatgcccaaacgtcaggtttggttgtaccaagagtttcttttatgggaaagagtcagctcatgaaaaagaatgcatcttctctcaatgctcatgcccttcatcggtctgcgattacactggctcatacaaggatctctacgctcactataaactgactcactccacgaatattttctggaatattaagcgctttagatgtgccaatttctttacgacctccatgctcatcagcgataagatactaattaaaagggtacatgagaagaaactattgcttgcagtgcagtgttttagggaaccgtgtggtgtgtatgtgactgtaagcttcattgcaccatctgctccagaagtaggagagttctcatatcaactctcctacaatgtggatggacacactgtgacttatgaatctccggaggtgaagagggtttgtaaagtgagtattgaaacccctcaagagaatttcatgttgatacctcacagtttattgcgtggtgacttgttggagatgcaggtttttatcatcgaaaatgtggaccaagagtaa

SEQ ID NO: 2613 - DNA, 912 bp, Arabidopsis thaliana
  Clone ID: AT_T12I7.C1.o8.tg
atggaaaacatcacgaataactccgagcgatccctcgaccgtccaaagaggcaaagacctgtctccatggagaatgttggaggaacggcgagtggaagtgaggtggcacgatcagcaacactgttggagcttgatcttctggactgtcccatctgctaccacaaacttggggctcctatctatcagtgtgacaatggacatatagcatgttcttcttgctgtaaaaaggtgaagtacaaatgcccttactgtagtttgcggattggtttttttcgatctagaatactggaaaaaattgtagaagcagtcgttgtctcatgcccaaacgccaaatatggctgcaccgagaagattccatatgacaatgaatcagaatcagcccatgagagggtatgcgagttcactctttgctactgccctgaaccagagtgcaagtacaccggcgtgtacacagatctctaccgtcattaccatgctgaacacaagactgatcactcatggttcaagtgtggcgagtacaataacgcgtggttacacgtcaccggtgaaaaattaagctttttagtccttcaagaatatgaagatggtccattggttgttgttcaatgttcgatggagtctcatggaatatgtgtgactgtgaactgtatagcaccttgtgctccaggagttggagaattctcttgccatctcatctaccggaacggaagtgaaaagattacgtttgaatccaagaagatgaataagattcaaaaagtgagccctgaaaatcatgtggcgaattacaagccgattccttactatttacgtggtgaagcctctaatttcatgtcgattccttactatttacttgatgaagcctctatattgaagatgcaaatttgcattcgccgatcaggagaagaagtataa

SEQ ID NO: 2614 - DNA, 1239 bp, Arabidopsis thaliana
  Clone ID: AT_F4N21.C1.o20.tg
atggttgtttttctggaagacaatgaggatgatttgattgtagttcaggctttcaaaggactcgagggcgtgtctgagctgtattgcacctatggcttcggaagtacgcaacctctcatgcagtctagcagaactcaaccagcttgggatcagcatagagccggcgaaaaccccatcggaggagatttaggaatggcaagatctggaggaaacgacggacatagagccggcgacagtcgtctctcgaagaggcaacgacttcctccttctcccgatgaatctgaagaggaattagacccagagttgttcgaagagccaagtaatttagaaggatacgaagatggagaattcgaagaagatgaagaagaattcgaagaagaagaagaagaattagaagaggaagaagacgaagaagaagaagaagaagaaaacgttactactgatgaacaatctggaagtcctaaatcatcccaaccggtgaagcttcagagctcagatgttctcgattgtcctacttgttgtgaaccactcaagagaccaatctatcagtgtagtaatgggcatctagcttgttcgtcatgctgccaaaaattgaacaagaaatgctcgttctgtagatgtaacatcggggatatacgatgcagagcgatggagaaggttatcgaagcatctatagtcccgtgtccaaatgcgaaacacgggtgtaaagaaaccaccacgtattgtaatcagtcaagccatgagaaggtttgcaagtttgtccgatgttcttgccctgtatcgaactgcaactacgtgagttcatactcgaatctcaaaagccatgcttgtagtactgcacacgtttggggtgaagacgacatccacttccagttagtgattgaccgtcctagaatttttaacatgaaccttggtaggaagaagacggttgtatttaaggaagagaaagagggtgatttgattgttgttcaggctttcaagggattggaaggtgtttatgtgactgtcaaccgtattgcacatatggctccgggaatacgtgacttgtcatgtagtttggctaagctcaacgagtatagcacactaaggagtggatcgttggtgaagaaaattcagaaagtgagagagaaaatgcatcttgaagatgacttgatgtggataccgcctaaaatgttgagcggtgaccactggaagatgcagatttgcattgcctatggatataaatttattcacatctga

SEQ ID NO: 2615 - DNA, 2970 bp, Arabidopsis thaliana
  Clone ID: AT_F9K21.C1.o210.tg
atgagtgattacggtgaaaagacttgccctttgtgtgctgaggagatggatttgactgaccagcaattgaagccttgcaaatgtggctatcagatttgtgtttggtgctggcaccatataatggacatggcagagaaagatcaatcagaagggcgctgtccagcttgccgcactccatatgacaaagaaaagattgttgggatgactgttgatcaggagagactggcctctgaaggcaacatggatcgcaaaaaaatacaaaagtcgaaaccgaaatcttctgatgggagaaagccactaacaagtgtccgagtggttcaaagaaatcttgtttacattgttggattgccccttaatctagcagatgaagatcttctccagcgtaaagaatattttggtcagtatggaaaggttctaaaggtttcgatgtcccgaacagcaacaggtctcatccaacagtttcctaacaacacatgcagtgtatacatcacatatggcaaagaggaagaggccattcgatgtattcagtctgttcatgggtttatcttggatggtaaagcactgaaggcatgttttgggacaaccaagtattgccatgcatggttgagaaacgtggcatgcaacaatcaggattgcctctatttgcatgaggttggctctcaagaggatagttttacaaaagatgagatcatatcagcccatacaagagttcagcaaatcactggagcaacaaatactatgcaataccgttcagggagcatgctacctccaccattggatgcttataccagtgacagttctactggaaatccaattgcaaaagttccttctagtacttcagttagtgctcctaagagttccccacctagtgggagctcgggtaaatcaactgctcttcctgctgcagcatcatggggggcacgtttaacaaatcaacactctttagcaacttcagctttgtcaaatggatctttggataatcaaagatcaacatcagagaatggaactttggctacgtctacagttgttacaaaggcagctaatgggcctgtatcctctagtaacagtcttcagaaagcacctctcaaggaagaaattcaatcattggctgaaaaaagcaaacctggtgtgttgaagcctttgcagcagaagattgtgttggatcccgagtccaagagaactacatcacctaatagagaccctagtagcaatcagatatcctgtttagtagagtcttcctacaatagcagagtcattgacaagccttctgctgttgagaattctcttgaacacacaagtgaaattgctgaagatgtcttcgatgttggtaaattgtctgctgatgttgcatggatggggataactacaaattctagggatgaaacccctggtgttccagtggttatcggtactcattgtgatcttggttctattacacaatctgataacgatgtacaaaatctcgagcaatgtagaaaacagtctcctacaaacacttatgcagaagctgacatatcactgaatggaattcatggttcaaggcctgagtgggattggagatcaggtttgcaatcccagatagatgttaaggaaccgttggaagtcaatgatttctcatcattcaataacaacagacgtggtattgcagaggctgttagccactcgacttctaagtttagttcatcaatctcaattctggattcaaatcatctagcttctcgttcgttccagaaccgggaaacttcttgtgggatggattcaaaaactggatcctcctttgaaataggtagtgatagattgcatcttccaaatggattttctgagaaagctatgtccaatatggagcattcattatttgctaatgaaggcagaagcaacattcagaatacagaggatgatatcatttcaaacattttagactttgatccctgggatgaatcgttgacttcgcaacacaattttgcaaaattacttggtcagagtgatcatagggccagtactctggaatcttctaacctcctaaagcaacataatgaccagtctaggttctcttttgctcggcatgaagaatcaaatagtcaagcgtatgacaatagaagttacagcatatatgggcagttgtcaagagatcagcctcttcaagagtttggagcgaaccgtgatatgtatcaggataagcttggcagtcaaaatggttttgcctcaaactattccggtggatatgaacaatttgctactagtcctggattatcttcttacaagagtcctgtggcgaggactcaagtttctgctcctcccggattttctgctcccaacaggttacctcctcccggtttctcttcacatcaaagaggcgacctgtcttctgatattgcatcaggaactcgtttacttgactcagccaatttgttgaggaacgcatatcatgtaccacctccaagtggaaatttgaatgctgcaggagatattgagtttattgatcctgcaattttagctgttggaaggggaagacttcataatgggatggaaacagcagactttgatttgagatcagggttctcttctcaactgaattcatttgataatgatgcaagactccaattgttggcgcagaggtctctggctgcacaacaagtcaatggatttcacgatcccaggaacgtaaacaacttctcttcttcgttctctgacccatatgggattagctcgaggccaacggatcaaacacaaggaactggcttgtctcctttcacacagctgcctagacaagcttcagcaaatccattgttgtcaaatggacactgggataataagtggaatgaaccacaaagtggtaacaatcttgggattacccagcttctaaggaatgaacggatgggttttaatgacaacgtttacagcggttttgaagagcctaaattccggaggcccggtcctggagatccgtataacagaacatacgggatttga

SEQ ID NO: 2616 - DNA, 375 bp, Arabidopsis thaliana
  Clone ID: AT_F16M14.C1.o12.tg
atgttggtagctatacagttctgcaacaggtttcagtgcagtggtggagagggacatctaaccgaggatgattcagcgagaacacgtctacttgcagacaaagatgacgatggttcaagcatgggttcgtgtgacgattcttatgcaaacgatgatgctgacttagaagagtttatgggaaatgatggtgaagcaagtaaccgaagtagacgtctctgtgccatttgttttgatgttccaagagattgctttttcctcccttgtggtcattccgtctcctgttatgaatgcggaacaacgatgcaagaagctgatgggagttgtccaatatgtcgaaggaaaatgaagaaagtgaagcgaatctatacagtgtaa

SEQ ID NO: 2617 - DNA, 1467 bp, Arabidopsis thaliana
  Clone ID: AT_F3L17.C1.o20.tg
atggaggcgagacctgactctaagaagaagggtggtgttgtttttagagatagatttaacagcaatagttgcaaggttcctatttgtagtgatgagaaaaaatcaatgaactttactaggtttgttggctcttcagataagaaagagaaatcagtgttgtctacataccgctcttcgccaaacgggaaggaagtaattggaacttcctctaagatttgtatctctagctcctcttctgtgaaaagtggtgagaagcaaccgttttctcagatagccattgattcatcagagagcagcagaggtagtgaagacgaggtagagtcagaaatcttgcaagttcctcttggaagagataaaagaagaatgaacaataaacttatttatggaaaagttataacacctgaagcggaatgctcaaagttgccatcaagctcaagaatcaagagaggttttaggcagagatttgggttgagcaagcaagagtttcatcctggtccatctggccagtcaacatctgctaaccggggatgcagcccgttgttgtcaggtgtcattccaagtggttttggattggacaaaagattaagtcggaaggcagatacaatcagtaagacaaaagtttacggagaaagcagttctagctcctcagctagggggaagaatgtaacagaacctccaccagttgaagtgagacgtcgtagttttaatccgagaggttctgtttctgatagtagacgggctagacactgcattttggatgatgacaacgatgttgcttcagttgggagtcagagattggcaaatagaaataatagtcgcattagagggagtggtagagacggtttatcctctgtcacggcagcagagatgtctcagactgaaacatcaaacaatctcaattctcctgtctctttggagctgttctctggttttccagaatttggcctctctggttccttattgagtcatgacagttttcgcagttataatttagatgggatctccgagattctgccagaacttgataggatcgaacaagatatcgaacttaattatgaggatctgcttatcatggaaacaggtttacttctcggtggactaagcttccatgaccaacaccgagacatgaggctagacatcgataacatgtcatatgaggaactattagctctagaagagaggattggtacagtaagcactgctttgacagaagaagcaatatcaaagtgcttgaaaacaagtatctatcagatgaaacctttgagttatgggtctatcaccaaaagtcctagtgataacaaggaagatgccaaatgcagcatctgccaggaagaatatacgattggagatgaagttgggaggctacactgtgagcacacataccatgtgaagtgtgtgcaagagtggttgcggataaagagttggtgcccaatctgcaaagccacagccgaaacctcctctaaataa

SEQ ID NO: 2618 - DNA, 1191 bp, Arabidopsis thaliana
  Clone ID: AT_MCD7.C1.o7.tg
atggaggaaacaatggcagctaggtattggtgtcacatgtgttcacaaatggtgaatccagtaatggaatctgagatcaaatgtcccttttgccaaagcggattcatcgaagaaatgagcggtaatggcggtggaggtggtggcagaggcataagagatgttcaagattcagaaaccgattttggaacagaccgtgcattgtctctatgggcaccaatcttgcttggaatgatgagtagtcctcgaagacgaagaaggtttagaagatcagagtttggtgaagagaatgatgataatggtgatgacttgactactaatgctgatgggaatgggaatgatagtaacaacagtaataataacgtgtatcgtcatcatcgagctaggagacatggtggagagattgatttagatagagagtttgaatctatcttgaggagaagacgaagaagctcagggaatatattgcagttgcttcaagggattcgtgcagggattgcttctgagtatgaaagctctgataacaattgggataattctcgagagagggatagagttataatgattaatccgtataaccaatcgctagttgttccttcggatcagaatcagaatcatccttcattgacttcacttggagattacttcattggacctggtttagatcttttgcttcagcatttggctgagaatgatcctaataggcaagggactccacctgctcgtaaagaagctgttgaagctttaccaacggttaagataatggaacctttgcaatgttctgtttgtttggatgattttgagaaaggtacggaagctaaagagatgccttgtaagcataagtttcatgttcggtgtattgttccctggcttgagcttcatagttcttgtcctgtgtgtcgttttgagcttccttctagtgctgatgatgatgatgagactaagactgattccgagagagtgctgagaacaagaaatgttcgggaaacgagtaacggaaacgttgttgagaatgtgggaaatgcggatagaggaagagaggatgaggtgaggagtggaaatgggagacggttttcgtttccatggccgtttagtggattgttctcgtcttcttcttcttcgtcttcttcaacctctggatctcaatctggtgagaacaatttcttctcaagatcttctggttcttctcgctga

SEQ ID NO: 2619 - DNA, 1014 bp, Arabidopsis thaliana
  Clone ID: AT_F15A17.C1.o230.tg
atggggaatctgatcagtttgatcttctgctgcgggagaaggcagaggagcaatattcctccggcgatggaaacggctcctcttgaactcccaccgaacagatttgtattcgccgccgtgccaccatatctgaaccctaaccctaactacgttgaccagtatccaggtaactgccttcctccgccagtaactgagccgccgatgctaccgtacaatttcaaccatttgcatcactatcctcccaacagttaccaactacctcatcctttgtttcacggcggtagataccctatactgccgcctcctacgtacgtccaccagaaagccgtcacgattcgtaacgatgttaatctgaagaagaagactttaacgctcatacccgacccggagaatccgaatcgacttcttgtctccttcacatttgatgcatccatgcccggaaggatcacagttgttttctttgctacagaagatgcagaatgtaatcttagagctacaaaggaagatactttgcctccaatcacttttgatttcggagaaggacttggtcagaagttcatacaatcatctggaacgggtatagacttgacggcgtttaaagattccgagctattcaaggaggtggatacagatgtcttcccgttggcggttaaggcggaggcaactccagcggaagaaggaaagtctggttccaccaatgtgcagattactcaagtggtgtataccaaggagaaaggagagattaaaatagaagtggtgaagcagatactatgggtgaataagaggaggtatgagctgcttgagatttatgggattgagaacacggttgatggttccgatgagggaaaggaatgtgttgtatgcttgtctgaaccacgcgatacaactgttcttccttgcagacacatgtgtatgtgtagcgggtgcgcaaaggcgttaaggtttcagacaaatctgtgcccagtttgcagacaacctgttgagatgcttttggagattaacaagaacggatga

SEQ ID NO: 2620 - DNA, 603 bp, Arabidopsis thaliana
  Clone ID: AT_F17P19.C1.o5.tg
atgtctcaatctctaaatcaggatgccattgatgaagcaattgcattagatttgcagtttgatgatttatacctaacgattaacgaccagtatatcgcattgaaaatcaaacaaaacgaagaagcgatgtccatacaagctgatgaagattatgcaaaaatgttgcaattacaggaagatgaagaaacagcaaaaaccttgcatgccatggaagaaaatcctccgaacattcctcagtccgatgttccttcgactagtagggacacaagtggccttaacgatggtgataggcgtcaggatcagcctacccttgttgttaaccaaactgctattgagaacaacaatcccggaaatgggtcaggagaatcaaccgaggtagtcaataaagaaggattaccagaaaatataatctccgggttaccaactcaaaagtacagtcgcaaaacttggtggtggtcaaagaaaacttttgttcctgatagaaaagagtgttctatatgtatagccgactatgagaagggagataagataaccatcttaccatgtaaacatgccttccataaggattgcattgcaaattggttaaaagaaaacaaggtatga

SEQ ID NO: 2621 - DNA, 840 bp, Arabidopsis thaliana
  Clone ID: AT_T17A5.C1.o9.tg
atggcctcgtcatcatcatcatcttatagattccaatctgggtcttaccctctttcgtcaagtccttctcttgggaatttcgtcgaacgcattaaagacgcttgtcatttccttgtctctgctgttttgggtaccattatctccgcgatcttgaccttcttcttcgcactagtgggcacattgctaggggcacttacaggagctttgataggtcaagaaactgagagtggtttcattagaggagcagcaattggagccatttcgggagctgttttctctatcgaggtctttgaatcatctctggatctctggaaatccgatgagtcgggtttcggatgttttctctacttgattgatgtcattgttagtcttctaagcgggagacttgtacgagagcgcattggtcctgcaatgctaagtgcagtgcaaagtcaaatgggagctgtggatacagcttttgatgatcacacaagcctttttgatacaggaggctcaaaaggattgacaggagaccttgttgagaaaatcccaaagatgacaatcactggcaacaataacactgatgcttctgagaacacagactcatgttctgtttgtcttcaggatttccagctcggtgaaacagttagaagcttgcctcattgtcatcacatgtttcacttaccttgcatagacaattggctccttagacacggttcttgcccgattttaacctcgcagttcagatatttctacagctcgtacatcaagagtctgctctgctcttcttccctcctccttgagtttcatagtcattgtaggactcctagttctctaatgtacaaagaaacacaaaaatag

SEQ ID NO: 2622 - DNA, 612 bp, Arabidopsis thaliana
  Clone ID: AT_T4C9.C1.o50.tg
atgaattctcgcaaagtggaatttcgcttcaccaatcttcaaaggaaactctcttctccatcacatgcaaactcagtcatcgttgagatcgataccaaatctgaagagatctttgtaaaccaaacaaccgatcaccaaacccgccggtccactccggctactctatcttgtctcgacactatcaatctcagtagttctagtcacgaccacatccgatcacttctccgtacccgattcgctagccaccattggttgtgtgatgacctagcctcagagatctcaacggcggctatcgacttaggttttggacgaaacggttttaccatcaccgtggtcgtcacagttacttaccggactgtctcggtaacgtcaaacaacaagaaatctttgaggatagttctactaggaaggataaaagcagaggaattgaagagtttgaagatggaaacagagtcttgttcaatctgtcttgagaatctagtctccggtccaaaacctagcgacctcacacgcatgacttgttctcatgtcttccacaatccctgtctcttggagtggttcatgcgtaaaaacacttgtcccctgtgtcggacggagctctacgatcgatga

SEQ ID NO: 2623 - DNA, 1299 bp, Arabidopsis thaliana
  Clone ID: AT_F25O24.C1.o10.tg
atgtatcaaatcttctttttctttcttcctctcctccacagttatgcctctgcccagactcctcctccgttcagaaacggtgacctcgtcgcaaattttgagccgagtttagccgtcgtcaccggagttctcgccatcatgttcgcactcactttcgtcctcctcgtctacgctaagtgctgccacatcgatctccgatcaggttccggcgacagaagaaggcacgatcgccggctcagacaaggaatattctttaaccggtcaacggcatcatcggatcgattctctggtttagacaaaacagcaatcgagtctcttcctctgtttagattctctgctttgaaaggatcaaaacaaggtcttgattgttctgtctgtttgtctaaattcgaaagtgttgagattcttagattgttgcctaagtgtagacacgctttccacatcggatgtatcgatcagtggcttgagcaacacgcaacttgtcctctttgcagagatagagtctcaatggaagaagattcctctgttctcactaacggaaacagtttcaggttcttgaatcagtctgagattagagaagattcgagcttggagctttacatcgagagagaagaagaagaagaaagaatacacagagaagaacttagtgggtcgtcgagattcagcatcggagagagtttccggaagattctgaaattaggtaataaagaaaaaacgttacttgatgaacacgtgaacgataaagatgagaagaagcttatgcacaagttcaatcataggatcgttgtgtcggatgttgttttcaagaatcgttggagcaacgtgagttcatcagatttgatgtttttgaattccgagatggttaattcgatttctagcgagagattttcttcattggatcatgtgaagagaggagatgaagaggatcagataggtatcttgcgaatcaaggaagagatggaagcgaagagaatgttggagaacaagttaacttcgatgacaactatgttttcctcggaaaacggagactctggttcgaaatcaagaagcgttatgatcgaaccaggacgaagatcggtgtctgacatcactgcggttcctagactcagtatatcgattcatggagattgcagcggttcagccgcagagactgcgtctgcgttacaaaacggtgggaatgagacggaggagagaagacggcgtttgtggctgccgatcgctagaaaaactgctcaatggtttgctaacagagaaaaaagaagtcaaattaacacaacacaccaacactttgatgtttag

SEQ ID NO: 2624 - DNA, 1539 bp, Arabidopsis thaliana
  Clone ID: AT_f2o15.C1.o210.tg
atggatcccacaaacagcagacacggcgcttcttttgaattttctactcggcgttttacactttccacgtttggtcaaaacgctccttctctatacgtaacgaccgtttataactccgctatcatctacccagtcaaacactcaccacgtgtctatttaccgtctaatccgacaccgttaattccgctcctaagaatcgccttaaaaaccacgttttcattttctcatcttcaaacctctctgtcattactctggtcagcgattcttctttcttcttcttctcagatcctttcaccgagtaagaagattttaaagatgccgtcaacgccgacgacgccgactacaacaacgccgatcacggcttcgtattggtgttacagctgtacgcgtttcgtcagcgtttgggctgatcaaggcacaacaaccgtcggtagcgtcgcttgccctcactgcgacggcggttttatcgaacagattaacgattcttcctccgccgctaccgaattaacgattccggcttctactgaagtaagatcgatcaataacaaccgtagatccgtgattagacgccggagatccggtcgtcgtccgtcctttaatccggtcatcgtacttcaaggaggcgccggcgagagagaagagggagaagaaggagatgcggctagagatcgacgcgcttttgagttttattacgatgacggatccggatcgggtcttagaccgcttccggattctgtatctgagatcttgatgggatctggattcgagcggttacttgaacagctaagccaaatcgaagcgtcggctactggaattggtagatctggaaaccctccggcgtctaaatcggcgattgagtctttacctagagtcgaaatctcggattgccacataggctcggaggctaattgcgctgtttgcacggagattttcgagacggagacggaggcgcgtgagatgccgtgtaaacaccttttccacgacgattgcatcgtaccgtggctatcgattcgaaactcttgtcccgtgtgcagattcgagctaccttcagagcctaatcgacggagcaacaacaacgaggaggataacgccgtggggatgacgatttggagacttcccggtggtggattcgccgtagggaggtttaacgcagcaatgagagacggagagagagttttgccagtggtgttaacagaaatggatggtggtgggattggtaatagccaggatggtcctagacggatctcatgggttaggtcacacggtacactcgaatcggatagtaacggtactggctcaggttccggctccggtggaagattgaggaggatggttcgtggaatggtgtcgttaatgaggagagtgagaccaaaccgtagctcttcttcttcatcagctgcgatatcaacttcttctgataatctggatttgaacattgaagtagaatctagggttttggataggtcaaattcagtgatgagaagatacttcagaagaaacagaagtaacagggattcttcgtcttcagttcttcattga

SEQ ID NO: 2625 - DNA, 1056 bp, Arabidopsis thaliana
  Clone ID: AT_T5A14.C1.o7.tg
atggaagaagcagttgtaacgaggtattggtgtcatatgtgttctcaaactgtgaatccagtcatggaagctgagatcaaatgtcccttttgtcaaagtgggtttgttgaagaaatggaagatgacgacgatcatgattcttctgatccggctgatgttagagcaaacaactctctttgggcgcctatcttgatggaacttatgaatgatcctgtgcgtcgtaggagaaaccagagtgttgagtctgttgaagataatcaaaacgaggtacagaccgagaacaatgaagacgatggagaaaatgatttggattggcagcttcaagagattctcaggagaaggagaagacattccgctgctgttttgcagttgcttcaggggatacgagcagggttgtctgtagaatctgagagtactggtaatggaggtaataatccgggacgggtgatcttgatcaatacctccaatcagactatcacggttcaaaactctgctgatatggattctgtacctgctggttctttaggtgactatttcattggtcctggatttgaaatgttgcttcaacgtctagctgagaatgatcccaacagatatggaacacctcctgctaaaaaagaagctgtcgaggctttggctactgtgaaaatcgaagagactctgcaatgttcggtttgtttagatgattttgagattggaactgaggcaaagctgatgccctgtacgcacaagtttcatagtgactgcttgttaccatggcttgagcttcacagttcatgcccggtttgcagatatcagttacctgcagatgaagccaagactgattcagtaacaacaacgagcgataacaatggaagcagtagtgcttctgctacaaccagccatggagctgagaacagcgatggaaaccggcgccaagaagaagaagaagaagaagaagaggaggaggaggaggagaacgagaacaatgacggaagcggattctcgatcccgtggccgtttagcaccttgttctcctcgtcgcaagatagcaatgcaccaacggattctagttaa

SEQ ID NO: 2626 - DNA, 657 bp, Arabidopsis thaliana
  Clone ID: AT_F18O14.C1.o14.tg
atgtctgatgtcccttcttgttctagcggtaatgatacaaacaacaatgattcgagtaacttcgaatgtaacatctgcttagacttggctcaagatcctattgtcactctctgtggtcacttgttctgttggccttgtttatacaaatggctccatctccattctcaatctaaggactgtcctgtttgcaaagccgtgatcgaagaagacagattggttcctttgtacggtagaggtaaatcgtctgctgaccctcggtccaagtccattccgggtctcgaagtgcctaaccgtccatcgggacagagacccgaaactgcacaacctcctgatcctaaccatggttttgctcatcatcatgggtttggagggttcatgggaggttttgctgctccgatggcgagtgcgcggttcgggaatgttacattgtctgcagcgtttggcggtttgattccttctttgttcaacctccatttccatggtttccctgatgcagccatgtatggagctgctgcttctggcggcttccctcacggtttctcgaatccgtttcatggaggacactcgcatatgcatagttaccagcggcacacggctagtgaggaaatcgatttagctaactgtatttcgctttttattctagattttattgcataa

SEQ ID NO: 2627 - DNA, 678 bp, Arabidopsis thaliana
  Clone ID: AT_F27J15.C1.o36.tg
atgtctgcaaacgagttacctgcttcagctcaatccttgcaagaacaattccttggcagttttgtcactagaaagcttcttctgcacgacccatttgaccacaactctcttcgagtatttgcggttgcaccatctcctctcataacacatgagaacaacctcaaagggaatgttctgatgcttctctcagttctcatctgtggcatcatctgttgccttgggttacattacatcattcgctgtgcattcagacgttcttcacgtttcatgatctctgagcctatatccagtctttcaacaccacgaagttcatcaaacaaaggaatcaagaagaaagctctgaggatgttcccagtcgtgagttactcacgtgagatgaacttgcccgggattggtgaagagtgtgtcatttgtttgtcggattttgtttctggtgaacagctcaggctgctccccaagtgcaatcatgggttccatgttcgttgcatagacaagtggcttcaacatcatttgacatgtccgaaatgcagacactgtctggttgagacatgtcaaaagatattaggtgacttcagtcaagctgattcaatggcatcaacaccaacagagagcgtaattgtcaggattgatcctctagaacctgaaggaagagtaaacacttttagagaaagcagctag

SEQ ID NO: 2628 - DNA, 639 bp, Arabidopsis thaliana
  Clone ID: AT_F2A19.C1.o150.tg
atgtcaaccgccaccctcgtcgtcttccctcctccacctcctgtccctatccctacctatataactagcctcggccttggctactccatagccatagctctaggtttcctcgttcttatctccacaatcattctctcttcttacatctgttgccgcgcctcacgcctccgcttctctgcctccgccgcaaacgcaaacgcaaacgcatcgtttagcgaccgtggcgttatcgtcccaagaatcatattcgtagctgaagacgacgatcttgagtctggaaacgtcgtcgttggaggtcttgatcattcagtcatcaactcttaccctaaattccatttcactaaagatatcaccgccgtagtaaacggtgatgggtttcacgacggagaaggaagagagacgacgtgttcgatctgtttatgtgagtacatggaagaagagatgttaaggatgatgcctgagtgtaaacactacttccatgtttattgtcttgacgcttggcttaagctcaatggttcttgtcccgtttgtcggaattctccacttccgacgccgcaatctacgccgcagtcaactcctttgtcggaagttgtgccgttgtctcaatacgccgccgatcggaggagatccagaagataa

SEQ ID NO: 2629 - DNA, 909 bp, Arabidopsis thaliana
  Clone ID: AT_F6A14.C1.o25.tg
atgcctaattcgatgcgtaaaacccatggaatggctgagcggtctgatgattttgattgcactgtttgcctgaaattgctgtacgaacctgctacaactccatgtgggcatacattctgccgatcatgcctctttcagtcaatggatcgcggcaacaaatgtccactatgtcgaactgtcatttttatgactccaagaacatgcgctgtcagtgtgacactgaataacatcatagagaaaaactttccagaggagtatgctgaaaggaaatcagagcaagacactctggtccacctaggcaatgaaagtatgccccttttcgtcatggatgtgataatcccctgtgagaagaataatggaaggaaatcatcggatgggaatgctcttgattcggcgacaggttctccagtggatgttgcttgcgaagttgaaatcacagagtgtgatccactcccggatggacgttttgtcctggagctggaaagccatagaaggtgccgcattgtaaaagcttgggatcaagatggatatcgtgttgcagaggttgaatgggtgaaagatataccaccacaaagcgagcaagggaaagcagatctgcgggaactgacgaccagcgcagcatcatttgctcggtcatggctagatagagcaaaggaagcagctagacaaggagacagaagaagacttgaaatacttctaaatgttgaatctatgataccaacgcctcaagatcccgagcgcttcagtttctgggagaccttcagaaagattggaactacttcggcttcaggatactggagagagaataaagcgcgggttgatatatctccgatcagtagaaagaggatgcagaatgcaatgaactggcagcatgatggcattgtattgccggttaaactacagagataa

SEQ ID NO: 2630 - DNA, 477 bp, Arabidopsis thaliana
  Clone ID: AT_F11B9.C1.o106.tg
atgacgtcatcttcaccgtctccacaagcctcgatgcttttgtactggcacgagaatcaatacgacgaccggaacttccagattcatggccggacactcttcttcgccttagctttattctccgtcgtgctcttcttcgcactactcactctctacatccaccggaactgcctcccccgggattctatcaatctccacgcgtcctctcccgatcgactcacgcgttgccgtagcggagggcttgatccggcggagattcggagcttgccggtggtgctttgccggagagaaagggcggaggaggaggaggagaaggagtgttgtatatgtctaggtggtttcgaagaaggagagaagatgaaagtgcttcctccgtgtagccattgttaccactgcgaatgtgtggatcggtggcttaaaaccgagtcgagttgtccgctctgccgagtctccatccgtgtcgactcgtcaagctaa

SEQ ID NO: 2631 - DNA, 2013 bp, Arabidopsis thaliana
  Clone ID: AT_F17I5.C1.o130.tg
atgtcttccttggggagcagcaaatccctgagggatgagatggaggtaacaaccgccgatgtttttccggaggttaacgccgccgctgtgacggaaaatcttgatcggaacgagcttgtgcttgctgacggagtcgtgtcggctgaggaaaggaatattgagccagacaatcgtggagagaggaagatagagagcgagtcgcctccagaggatgatgtttgcccgatctgtttcggctcctttacggttccgtgtcgtggaaattgtggtcattggtattgcggaaattgcatcttgcagtactggaactatgctgcaatatctaggccttgcaagtgtcccatgtgtgttaggcacatcacgaagctgtcaccagaaccatctttgcaagagcgtcaggagcaagaggtgaaggaggttcttgataaagtccgtaggtataaccgtctctttgttggaggtctaactggctttgttcagatgttcatgagtaccctttacactgccgcagagtttaacttcattccaacgggcgggttcagaatagtgacagtttttgactacgctgcgattgctatgatcctgattctacgcttagtagggatatatcggaggagacgcctagctcagcagaagaagaaacatcgattgagctttctacttgaaaaccatcttttccgatctatcgaatcggagcggcgaaggaaggagaatgggtgtccgtacaatatctcaggaggcattcgacgatctgggatcattacatgtgttcctggagaaagtagcgttaaggacaatccggtgattgcttgtttagatagactaaaagaattcgacagtgtttcaatagacggacctcttcgagatgaggttttcgatgagatatcgagtttgttcaagaatctcaatgagctttgtagcagccaagaatcagggaacgctgcaattgcgacaaaacatggtgctgtggatttaacttgctcgatttgttccaaaatcaagatatctactagaagtaatcgtgttcttgttccttgctttaaggctttggctgtgttgatccgtgacattcagagcacagagagattcaggaattgtactggaccaaatatcgttgttgatctcttaaatgattccagctccgattctgatttgttagatgctggttttgcggttgttgctgctgcagcaactggtaatgaagttgtgaaacagttattcatggaactgaaaatcgatgaacttattctgcaagtgttgaatagagagagtaaaactaccattagagctctgtacgatgctatttgtgctcttttgactccagatgacttccgtgttgttgcttcccaagtttatggttatgcacgaacttttgccaaattagggattgcgacagccctcactgaagcattacaggcagggattggctctgatagtttggtgtcagcaagtactgcgttaaaagcaattgctgtcaatgatgaaatatgtaaatctattgctgaatccggtggaatagatacacttcttcggtgtattgatgatagcggtgagcaaggcaacaaaactgctgctaagacatgttgttccctgttgtctaagttggcaggaagtgactctaacaagagtaccatagttgagaagcaaggtctggacaagctaatcacactcgcactacgattctctgatgatcctctagtcatacaagaggtgatgttgataatctctataatctgtctgagatcaccagaccacgcagccaaggctatagaagctggagctggtgatctagcggtccaagcaatgaagaggttcccagtagctgctcaaatgcagagaaacgcttgcaacatgatacggaacattgctgtcagaagtgcagagaacagaactattctgcttgctaatggaatcgagaagctgataagaactgctaaagccaacaatgagacatgcagagccgctgcaactgatgcactgagagaccttggccttgataactacaataactaa

SEQ ID NO: 2632 - DNA, 609 bp, Arabidopsis thaliana
  Clone ID: AT_F16J13.C1.o210.tg
atgaatgatcccattcccaaacccatagtgagcgttcaggtccaagctgtgaaagtctctacaaactcgatcttcctcatcgtcaataccattaaggatgagatccttataaaccctgtcactggccatcgagccgaaacgtccactccgctttcctataaatcacttcccatcaatttcagtctccctagttgtagtcaccaccacatccaatcgttactccacgatcaactccatagcgacgacaattggttgtgcgatcacttagtcccaaagatctcaacggctgcaatcaacgcaggttttatgaacaacggcgttgaattgaccgttggcgtcacagttacttaccagtatgtccatgtcgaggagacatcatcaaaggaatcgaggatggttcgactagggagcatgaaagcagaggaattgaagagttttaacatggaaacagattcgtgttccatctgtctacagagtctagtctccagttcgaaaacaggacccactcgcatgagttgttcccatgtcttccatagtagctgtctcgtggagtggctcaagagaaaaaacacttgcccgatgtgtcggactgtgctctacgatcgatga

SEQ ID NO: 2633 - DNA, 1614 bp, Arabidopsis thaliana
  Clone ID: AT_F16G16.C1.o4.tg
atgattcagctaaaggtttacgcgggtctgagtactctcgcgacattggttgtgatatatcatgcttttagtagcagaggtcaattttacccagcgactgtgtatctatcaacgtctaagatcaatttggtagttcttttgaacatgggtttggtattaatgttgagtttatggaatcttgtcaaaattgtgtttttgggttctcttagagaagctgaagttgagcgtttgaatgagcaagcttggagagaactgatggagattctctttgctattactatttttagacaagatttctctgttgggtttatctctttggttgtgactcttttgttgattaagggtttgcattggatggctcaaaagagagtggagtatattgagactactccttctgtgactttgctctctcatgtccgtatagtttcttttatggttttcctccttatcttagattgtctccttacgtatagttctatacagcaattgattcagtcacgtaaagcttcaatgtcagtcttcttcacgtttgagtatatgattctggcaacaacaactgtttctattattgtgaagtatgccttctatgtcactgatatgctcaaggaaggtcaatgggaaggaaaaccagtatacactttctatctggagcttgttcgtgacttgcttcacttgtccatgtatctttgcttcttcctgatgatattcatgaactatggccttcccttgcatctaatacgggagctctacgaaacgttcagaaacttcaagattcgtgtgactgattaccttcgatatcggaaaatcacttccaatatgaatgatcggtttcctgatgcaactcctgaagaacttagttcaaatgatgccacttgtatcatatgtcgtgaagaaatgacctcagcgaagaaattagtatgtggccatctatttcatgtacattgtcttcggtcatggttggaacgacagaacacatgtcccacttgcagagcactggttgtcccagctgagaatgctacatcaacagcttctggaaaccgtgggccacaccaagaatccctgcagcaaggaaccggtacttcaagttctgatggtcagggttcttctgtttctgctgctgccagtgagaatatgagcaggcacgaggctaggtttcaagccgctgcttctgcagcctctatatatgggagatccattgtttatccatcttctgcaaacacactagtatggtctcaaggtaattcattacttcctcagacggaggtagaagctcaaagaagatttcttgagtcccaaatcgaggacattctcgtttccaattttgttaaagacgaagccatgaagagtctgatatggttaacagcagaagaggctgcaaagaacagaggaaaagttctttctttgtatcgacaattacttaggagcattaactcgccaaaattgcagcttagttatgcttcaagacttgcgaagaaagctgaggttaggaccatcttcttgtttggctctgaggagatttcgaaacacaatgtcgctgatctcatccgtactggtgaatatgctctttctcaattgaaacaaggcaaaatccccaacaactctactcagtattga

SEQ ID NO: 2634 - DNA, 654 bp, Arabidopsis thaliana
  Clone ID: AT_msk20.C1.o10.tg
atggagactgagacgttgagaacaatagaagtctctacgatggtatcaaatcgacctaaaattgtaggggttacgaacacagtcttaatctaccaagaagaagaaattgaagaattgattgaatacgaaagtggaattgtagcaaatttaggatggtacacatctccacttgaaacaaatgctcacatcctcttgaatcctcgtcgtctcacgcgacgtgttctcactcaactccttgatgatcaatttttaggtcaaaaaatcgctcatgatgttaaggattcatttgctaatgataactctcttcgacaacctgttaccgtaaccgtctatgtgacatatatcaaagagaggcgtgtaatttttcctcatggtccgtcgttgttgtcgagaggtgcttccggagaagtgtttcatagattggttgaagaacagagagttgaatctgctgatttggaagaagaagatgagacatgttcgatttgtattgagaagttttcggagagtcatgaagacatcattcgggtgcctgattgtttacatttgtttcaccaaggttgtctattcgagtggcttggtcttcaaaactcgtgtcccttgtgtcgcaaagttccatacgaggaggaggacgaggacgaggacgaggagggttag

SEQ ID NO: 2635 - DNA, 927 bp, Arabidopsis thaliana
  Clone ID: AT_mzn1.C1.o30.tg
atgagtgaagaagacggcggctcaatgagtgtcaaaagcagtctctcaagcttcctcaagatcttatcttcttacaattccaatgttcttttagctgctctagtcttccttctcttagtcgtcctcttcgtcttgcttctccatttctacgctcgctttttctggtctccctctcatcaagatttctccgccgccgctagacatcgccggagaagacgaagaaaccggagaagaacagtgacgacaacaagaatcataccttctctcccactcggaggttttgatgatggagtatcttctccagctgctactgcaacaagggatgacaaaggtttggattcttcagtgatttcttcaattcctctgtttgtttacgaagaaaacgaggaagaggaggatgaagaagaagagtgtgtgatatgtttggggttatgggaagctggagattttggtagaaagttgagaaattgtggacatgggtttcacgtagagtgtatagatatgtggttgtcctctcattccacgtgtcctctctgtcgatcccctgttcttgccgccgtctccgatgaagaaaatcttaagctggccgttaacgccgtcgaagaagaagcagaggttagattacaaatgtctccagcgggagaaaacgagagcaacgtctccggtgatcggagagtttcactgtctctttctgtaatggaagatgatctcaaaacaggggatgacgatggagaagaagaggttagaattgaagtgtttgatgatgatgaggagatcaacgatggaggaacaagaagtgatcggagaagatcaatgtcaatgacgtcatcagcatcgagttcgttgatgaggatgttaagtagtagtagtagtagatcggagcgtaacaaagtgttcccgacggcgaggcaagattcatctaaatag

SEQ ID NO: 2636 - DNA, 1230 bp, Arabidopsis thaliana
  Clone ID: AT_F11A12.C1.o102.tg
atggcgtcgacgaagcccgattccgcaatcaaccttgaagaagaggctgaaggcgacggtgtagccgtagacgatccgattttcataccggagaccacgaacttactcgtccgttactcgccattcgacgacagggacatcgattgcaatccttatttccctttcacaggcccgatttcagattctggatcaggttcttactcggattctgagcccgatcccaacagctgtcccatcgatttcttcgatcgagattcttccgatgttgacgtggctgagtacttggaatcaggagggctgaccgccggtgattataatatttggggcttttatgaccccaaggaagacgaggaagaggaggagatagttttggggacttccgggtcggatctgcaaccgggtgattcaggggagcaagggcttcgagtgaccggtatcgattcagattccgattgtgaagatggcgtgtttgattttatctctgaggatagtagcgggaataggggaaatgattcgggtcgggtcgaggttggtacgggtcttcctcctgtgtgggatcatctcttcggagagggaaccgtgttggctgatgaagaatgggaggaggtgcagaacgcgattaactggacagcttttagtggacccgaagatgaggacgaagaagatgaattgtcttcactatcaagggatgatgaagaagaagatcatgaactggactggcaggttttgttaactgttaacaatgttgttaattatatcgaacaagctgaaggaatcatgctaaaccctgatgatatcgatccggattattacctgtatctatctggtttggatgaatttgatgaaaatcatagtggacattatgatgctgatgctattcttgggcaaatgtttgatgacgagactggaatcaggggaaatcctccagcagccaaaagtgtaattcaggatcttccggttgtggagcttgctgtggaagagttagacaaagggaacaatgtttgtgcggtatgcaaagatgaaatgttagtggaggagaaagtaaggaggcttccttgtagtcatttctatcatggagagtgtatcataccttggttggggataaggaatacttgcccggtttgtcggtatgagctgcctactgatgatcttgagtatgaaagacataagagctcagaaaggggcgatactggtttggcaaggaacgtgttgccgggtagatatagttaa

SEQ ID NO: 2637 - DNA, 1188 bp, Arabidopsis thaliana
  Clone ID: AT_F12A12.C1.o140.tg
atgatgccaaattctagatcggcgacaataactccgacgacagaatcaaccaccacaacaacaacaacaacaacgactctaacgacgtcgtattggtgttacagttgtacacgattcatcagcgtttgggaagatcaagacgcaaacgctggagtcttatgtccttattgcaacggtggattcatcgaagagattgaagattcttctaattccaccgtcgcggcgattccggcttcgactccggaagttagatcggttgaggaaacacatagatctataattagacgtcgtagatctaatcgccggacgtcctttaatccggtaatcgtcttacacggcggaggaggaggaggagccggtgagagagttgagaacgaagaaggtgacggagctactagagaacgacgagcttatgagttttattacgatgatggatctggttcaggtctaagacctcttcctgattctgtatctgagatcttgatgggatctggattcgaacggttacttgaacaattgagtcagatcgaagcgtcaggtaacggaatcggtagatctgggaatccaccggcgtcgaaatcagcgattgaatctttacctagagtcgaaatctcagattgtcatacgaaagcagaagctaattgcgccgtgtgtacggaggttttcgaagccggaatcgaaggtcgtgagatgccgtgtaaacacatatttcacggtgattgtattgttccatggctttcgattcggaattcgtgtcctgtgtgtagatttgagttaccttcagatccaatccaacggagtaatgaagaagaacatgccgttgggatgacgatttggagattacctggtggtggtttcgctgttggtaggtttaacgcgggagtgagagaaggtgagaggatattgccggtggtattgacggagatggatggtggtggacttggtagtaatgaaggaccgagaaggatatcttgggttagagctcatgagacaccggagatgagtaggaatggtggtcgttctggtaatggtggtagattgagaagagctgttcgtggaatggtttcgtttatgagaagagttagaccaagtcgtggctcttcgaattcgaatgttattgatttggatagtgatggtgaaactagagttatgaatcgatcaacttcgttgatcagaagatttttctga

SEQ ID NO: 2638 - DNA, 666 bp, Arabidopsis thaliana
  Clone ID: AT_K2A18.C1.o15.tg
atggatggttattattctctgtctcccatctctgtcctccaccggattaaagattccttccatttcgccgtctctgcccttctcgccaacctcttctccgctctcttcaccttcttcttcgctttagtggggactttgctgggagcattgacaggggctttgatcggccaagaaacagagagcggtttcatcagaggagccgccgttggtgctatctcaggcgccgtcttctccatcgaagtctttgaatcttccctcctcctttggcaatccgatgagtctggaattggatgccttctctacttgattgatgtcattgctagccttttgagcgggaggcttgttcgtgagcgtatcggtcctgcaatgctaagtgccgtccagagtcagatgggagctgtggagtcccagttccaagatcatacagacatctttgacactgccatttcaaagggtctcactggggactctctcaacaggatccctaaggtccgaatcacagacacctctccggagattgtctcttgctctgtctgccttcaggactttcaggtgggagagacagttagaagtttgccgcactgccatcatatgttccacctaccatgcatcgacaaatggcttcgcaggcatgcttcttgtcccttgtgcagaagacatctttga

SEQ ID NO: 2639 - DNA, 321 bp, Arabidopsis thaliana
  Clone ID: AT_F6A14.C1.o24.tg
atgaaaatatattttagccacagtatcatacgcaatcctcaaccagaaaacgagggcacaatcacagtaaatgcaaagatcgacggttacaatcccacgcccgcaagcaagctcgtggtcaagtctttagccaggaagatatacaagatgaccactagttctactggtgaaatgtgcataatttgtttggaagagtttagtgaaggaagaagagttgttactttaccttgtggacatgactttgacgatgagtgtgtcctaaagtggtttgagaccaatcacagttgccccctctgtcgtttcaagttgccatatcaatga

SEQ ID NO: 2640 - DNA, 375 bp, Arabidopsis thaliana
  Clone ID: AT_MYC6.C1.o14.tg
atgctgccagtgataatgatcatagggaccggatatatcgtttactacaccatagtaggcttttgggtaatcgtattcatcgttctattgtgctgcagaactcctcctcctccccctcctcctcctcctcctcaacaagacattgaaactggacatattccagcgatcaataaaaccacggtcgagacgatcataaaggttgaagatgtcgaagaaggagatgagggttgctgttcaatttgtctagaagagttcaagattggccacgagcttatgtgcataaagaagtgtaggcatgtttttcatcgcttttgtatgctttcttggattgatgcgaatcgaaattgtcctatttgtcgttgttctgttgattga

SEQ ID NO: 2641 - DNA, 1005 bp, Arabidopsis thaliana
  Clone ID: AT_MXK3.C1.o15.tg
atgtccgatgctccgtcgtcttccccggatgccacggcgtcgcactggtgctatcactgcaacaaacgcgtcgtcgttgaaaccttagatgactttgtcgtgtgctgcgaatgtaacaaaggtttcgtcgagtcaattcaaccgactcccgccgcttattcatcgccggcgccaccgcagccactttccccagatctgaatgtagaagactccagtattggctcgcatttcctccagatgctccgcttgttagcccacgcgccttctcagcgttcaccaccacgacaccttgatgttttatcttacgaagatgatttcttcaggttggagctcaatagtagaaacgaaatcgacgatgacgaagacgaagatgaagatgatggagatgaagaagaagaggatgaggaagagaatttaaccgtcaacgacgaagaagacgaagaagatgatctgaggaggagaaatcgttttcctctcacgacgacgcagtcgagaaccggaagaaacagaattctcgattgggctgagattttgatgggaatcgaagacaattcgattgagttccgtatggaatcagatcgatacgcaggaaatccggctgattacatagacgatgcagccggatacgaagctttgctacagaatttagcagaaggagatggtggtggtggcggaggaaggagaggcgcaccaccggctgcgaaatcggcaatagaggcattggagactttcgaggttagttcttcggagggagagatggttatggtttgtgctgtgtgtaaagatggaatggtgatgggagaaactggtaagaagttaccgtgtggacattgttaccacggagattgtattgtgccatggttaggaacaaggaactcttgtcctgtctgtagattccagcttgagactgatgatgctgaatatgaggaagagaggaaaaaaagaacttctaccgtgtcagattctgctgctgcttcttcttcttcttcaacttctcgttactga

SEQ ID NO: 2642 - DNA, 438 bp, Arabidopsis thaliana
  Clone ID: AT_F20D10.C1.o260.tg
atgatttcaatgttgtttccgcggtcgcctttgtgcacagcagccatagtattctacacatgtgtgtgcattcccttggggaggttgaagaagaatggtggagatgcggatgcgcatgatgatgacggttacaacctagtgggagtgatgtttggggacaaggaaaaggaggaggaaatttgctgccccatatgcctggtggagtttgaggctgaggatgcggtgacccatcttcccagatgcgctcatctcttccatatcaattgcatagaaccttggcttctccgtggccacctcacttgccctctctgcagatcatttgtattggctccaactcctcctacacaaaatgtcaataatgcacactcctcttccaccttgtatctctctatcttcttctttttctgtatctttctccatctacttggatacttgtag

SEQ ID NO: 2643 - DNA, 609 bp, Arabidopsis thaliana
  Clone ID: AT_T10I14.C1.o80.tg
atgacggaaacacaccgcacgacgacgacgtttcttgatttgctccgacgacagatgagcggtcacgatctcaccagaaggaaacggacgttaaaagaacggttgagattcaaatgcatcggatgctgtggtccaacctggaatctccgtctaactaacaacaccactcttcacagtccaacctcaagagacgacgaaatcgaagagttacaaattgaaaccggactcgttctcgaatcggatcatggatcgggtacgggtatgaatctcgcgacagcgttagaagcggagaggtataaccgtggagaatcgacggaggcggaggcagatatgacgccgaggagagtttcgttgatgagattgttggaagagacggcggagaaaatcgttgatgacgacgggaaagaaacggagatattaacggcgtctattgggacgttaacgggtaatgattcggtgtgttgcgtgtgtatgggaagaaagaaaggcgctgcgtttattccatgtggtcatactttttgcagagtgtgctctagagaattgtggctgaaccgtggatcgtgtcctctttgtaaccgtccgatcattgagatactcgatattttctga

SEQ ID NO: 2644 - DNA, 711 bp, Arabidopsis thaliana
  Clone ID: AT_F28M11.C1.o70.tg
atgtcttacagtgacccaaaccaaaacccgattccagaaacttacgctccatcaaactcaactgaatcagagaaactgaaactttaccaagcttttatcttctctgttccaatctgtttcacattcatcgttctcttcgttctttacgtcatttaccttcgtcgaaacagcaccaccaatgttgattggtcttctcttggcatgcgtggtggtacctttgtccccaccaacaacaatctctcaacggctgaattaggactgagcaaagatattagagagatgcttcctgttgtcatctacaaggagagtttcatagtcaaagattcacaatgttcagtgtgtcttggggactaccaagcagaagagaaactccaacaaatgccatcatgtgggcacacttttcacatggaatgtattgatctatggctcacatcacacacaacatgccctctttgtcgtctctctcttatccccaaaccgtccctagacctgtcccatcaaagcacagagattgtctcttccatagaaaactctaatggaggagaagcttcaactcaaccagattcccagtcagcaaccgaagcaataagtcacaccgatgatgtcgaagaaggtaaccgagatagtcaagaggtctctaaggagacggaagagaatgaccgaaacagcgtagggacatctgatggttgttgtacttgtagacttggttaa

SEQ ID NO: 2645 - DNA, 678 bp, Arabidopsis thaliana
  Clone ID: AT_F28M11.C1.o80.tg
atgtctttcatcgacccaagaacttacattccatcgaactcaactgaatcccagatactgaaatttacgtttatcgtctgtgtgccaatctgtgtcatattaatcgtcctcctcgttctttatatcatgcgtcgaaacagcaataccaacgttgattggtcttctcttggtggcttcgtgcccaccaacaataatctctcaacggctgaattaggactgagcaaagacataagagagatgcttcccattgttatctacaaggagagtttcactgtcaacgatacacaatgttcagtgtgtcttggggactaccaagcagaagagaaactccaacaaatgccatcatgtgggcacactttccacatggaatgtattgatctatggctcacatcgcacacaacatgccctctttgtcgtctctcccttatccccaaaccgtccgtagacctgtcccatcaaagcatagagattgtatcttccatagaaaacactaacggaggagaagcttcaactcaaccagattcccagtcagcaaccgaagcaataattcacatcgatgatgtcgaagaaggtaaccgagatagtatagaggtcgttaaggaatcggaagagaatgacagaaacagcgtagggacatctgatggttgttgtagttgtagacttggtgaaaaagcgtag

SEQ ID NO: 2646 - DNA, 2076 bp, Arabidopsis thaliana
  Clone ID: AT_MBD2.C1.o14.tg
atgcagggggagagggccagtcttggctatttatcagaggccttgaactttgagcatggttcttcttcaagtaatggtgtgatagatcattgggagaatattcacagtcttggtgataatgacttgcaggattacatgattgcaaattctgaatcaaatacttcgcttgcaaactcagtttatcacgagcaacagggtttacgcagatttagccttggtgaggctagctctagtggcacgaaggatgaagcttccagtcacaatgagcaacgaatggaaacaagatgctttgacggacgaggaaatgaaataattgatttagacccagtgtttgcgcagccatcaggcacaaatcaacctgttcagaatgtcaatctgaatgcagagtatatagaaattcacgaggatattaatccatatagaggtcggtctggcttcatagaagctaatggaccagggaccagggtctcacaacctggcagatcttttgaagagaacggtgttggaacaggttcttctgtagagggacgtcgtgcatcctgcaaaagaaaagctcttgaaggcagtattagtcaatcttcttcaggaggttatcatgatttccagcgtggagaaagcagttcgtggaccccaggttctacggtttttaggccaggaaatggtttaaacatatctggctcccttgacaatggaccaagaggaatggtctccggtactgtaccaaattttcctgtttctgcaccaaattttcctgtttctgccattgcagagagctccagtagaaatatatgcgtcaggagtaatccctcagatcatcaagaaactgtaaacccatctacctttgctgcgggaactgttgtcaggcggcctgtccctccatcccagttgaacttgtcaagacacttaccagcagatcagcattcattggacttgagacctggacagtcttttgtcgtttctcgtaacccaaattctactcctgtgagcataccacctggttcaaggactatgctaccaccatttcggtggactgggagctcactagtgggtggaacatcgaactctactgcgcccgttgagagaaatcttcatctagatgaaaccaggtcaagaagcatacccgggaatactcttgagattcccatgtttgcagctcctgaggtaggaaattttgcccgtagtcagagtagcagaaatgtaacaaatggaaacctgaatagtgcatcatcagtgtccaggacaggctcaacaacaagtgttccaccaccaccaccaccatcttctaatctagcgtggacttcttaccagaattcaccacattatcaaagaagaaggactgaaaggtctgaacttgcacgtaggtccttgctttcttcccttgcagcagatgctacaaaccagagatctggtgatcatccaacacttcgttcgttggcccctcctgcctcttcggatgggcttgtgcttcagcctggtggtgataatagtcagatgcataatcgggcttactcgagagcaggtccgttgtttgataggcaaggggatagtgtggttggtattcctcatcctttgcgggccttggcagctgcaagcagaggaagaagcagacttatggtgtcccagatgcagaatgtcttggatgtcatgcgtagggatgctaataataacaacttgcggcttgaggacgttatgcttctaaatcactcagtactatttgatggggctactggtcatgaccggtatagagacatgcgacttgatgtggacaacatgtcatatgaggaattgttggcactagaagagcggattggagatgtttgtaccggtgtaaacgaggaaaccatatcaaaccggttaaagcaacgaaaatacaaaagcaacacaaaatctccacaagatgcagagccatgctgtgtttgtcaggaggaatacaccgaaggagaagacatggggacactagaatgtgggcatgaattccatagccaatgcattaaagaatggctgaaacagaagaatctttgcccaatctgcaagactacaggcttgaacaccgcgaagaagcggaggatagcatga

SEQ ID NO: 2647 - DNA, 822 bp, Arabidopsis thaliana
  Clone ID: AT_T22E16.C1.o190.tg
atgagctttgttttccggggaagtagaggagatttagaaagcggattctcgggtggttttctacccgaaagacgagctatgcgtgttcatggagctcgaccagttaattctaattccctcgcttttctggttacagttcttttgctgtttatgattctcaattcgcatcagatgcctcctaatttcctgctgtggcttgtgcttggggtgtttttgatggcaacgacgcttaggatgtatgctacttgccaacaacttcaagctcatgctcaggctcaggctgcagcagcaagtggcctctttagccatactgagctgaggttgcatgtgcctccttccattgctcttgctacgagagggcgtcttcagggacttaggctccagctggctcttcttgatcgggaatttgatgacttagattatgaaactttaagagcacttgattctgataatgtttccacaacttctatgagcgaggaagagataaatgcacttccagttcacaagtacaaggtgttggatcctgaaaatggttgctctttggcaaagcaagcgtcaacctcatcctcagctgagaagatgctagattctgccaatgaaagtaaaaaaggaacagaagatgagctcacatgtagtgtttgcctagaacaagttaccgtaggggaaatcgttcgcaccttaccttgtttgcatcagtttcatgcaggatgtatcgatccatggttgagacagcaaggaacatgtcctgtctgtaaatttagagctcattcaggatggcaagaacaagatgagattgatgatgatgcttccgacatggtttga

SEQ ID NO: 2648 - DNA, 921 bp, Arabidopsis thaliana
  Clone ID: AT_T2O9.C1.o60.tg
atgtcgtcttccaccaccacaacaaccaccgtccacggcgagcctgaacgacgaacttactggtgtcatgaatgcgatatgagtttatccctcctctcctcctccgattccgattccgattcctctcctctgttatgtccccaatgccgtgtcgatttcctcgaacgtatggatcacgattcttcttcttctaatctctttgacgttaccatcggtgattttgaagaacaagacggagaaaacgatgatgaagacgacgaagaagattggtgtttcgttgatccagctgttaattccgatgataatttcctcctcgatagtccttaccttcaccgtcttcttcgtcatctcgcttccgataattcaggatcgtcttcttcttcctcgtcttcatcttcttcttcgttattgaaatcttcagatatcgattcgatccccacgattcagatctcgtcttctttgctctgttccaccgatgattcagatccagattccgttttactctgcgccgtttgcaaagaggatttcatcatcggagaatctgctcggagattaccgtgtagtcatatataccactccgattgcatcgtcccttggctctcggatcataactcgtgtccgctttgtagatttgagctccctacgacggcgaaggtgggaatcggtggctcagaggctgagatgagaatcagattatcggatctggctacgattgctgcagatggtgatgatgtggaagatgattggcttggaatcagaaacgcgttgagaagactggctcgtcgtcatgagcagatgagattgggagtgggagagatggagaggaatttggctaggactgtttcaggtcttggaattggtatgagaagaagagaagagattgaagcagacagaagcaacgtcacaacgacgcctttgtaa

SEQ ID NO: 2649 - DNA, 1047 bp, Arabidopsis thaliana
  Clone ID: AT_F14F8.C1.o200.tg
atgtcgtcggcgaaacttttcggttgttctattaacgttaacgttgaggcagaggaagaagaaggcggtgacggtggtagctcaaccaacgtggaggtttctcgatctggtaaccaaccggattgtgaagctatgagtttctccaatcagatggaaatcggcgttcgcaatacatattaccagtttctagagtcgaattcagattctggatcggattctatgtatgcagaacctgaattcatcgatttcttcgatcgagagtcgtacgaggtcgacacggtccgtgaggtttgtgtaagttcgaatcagagggttagtactccaggttatttcaatatttgggatcaggatgtagatttagggcttggaatcgggttaggttcaaggtcgggttcgggtcagttacctggtgattcaggtggggttggggtcgaagttggtaggggtgttactcctgttgagtataatctctttggagaggaagctatggtggttgatgaagtattggaatgggagaatttcaataacgctatccacttggttcaagaacctgcctatgctagtatggagggagaagaagaagaagaagaagacgaagtagtaatggaatttgcagcatccatttatagtgatgcttgggaaatattattgtacgataacatgacaaactctgctcctatggatttggatgttgaagtttggctagatagtgtagatggatatgctcctatggattacaatgctatcataggacaaatgtttgataacgagactggaatcaaaggaactcctcctgcatccaaaagtgtagtagatggtcttcctgatgtggagcttaccattgaagaattgagcagtgtgagcattgtttgcgcgatatgcaaagatgaggttgtgtttaaggagaaagttaagaggcttccttgtaagcattactatcatggagagtgtataataccttggttggggataaggaatacttgcccggtttgtcggcatgagcttcctactgatgatctggagtatgaaaggaagaggagagcatga

SEQ ID NO: 2650 - DNA, 1128 bp, Arabidopsis thaliana
  Clone ID: AT_MWF20.C1.o13.tg
atggatctatcaaaccgtcgcaatcctctccgggatctgagctttcctcctcctccgccgccacctattttccaccgtgcgagctctacggggacgagttttccgatcttagccgtcgcggtgatcggaatcttagccacagcatttttacttgtaagctattatgtttttgttatcaaatgttgtctcaactggcaccgaatcgacattcttggtcgattctcgttatctcgaaggcgacgcaacgaccaagatcctttaatggtttactctccagagcttagaagccgcggtcttgatgaatccgtcattagagcaatcccaatctttaagttcaagaagagatacgaccaaaacgacggcgtttttacaggagaaggagaagaagaagaagagaagagatctcaagaatgctctgtttgtttgagtgagtttcaagatgaggagaagctgaggattatcccaaattgttctcatttgtttcatatcgactgtatcgatgtgtggcttcagaacaacgccaattgtcctttgtgtagaactagggtttcttgtgacacaagttttcctccggatcgggtttctgcgccgagcacttctcccgagaatctggtcatgttaagaggtgagaacgagtatgtggtcattgagctgggcagtagcatcggtagtgacagagatagtccaagacacggaaggttacttacgggacaagaaaggtcaaattcaggttatctactgaacgaaaacacccaaaattcgatcagtccatctccgaagaagcttgaccgcggagggcttccaagaaaattccgaaagcttcacaagatgacgagtatgggagacgaatgcatcgacataagaagaggtaaagacgaacagttcggtagtattcagcccattagaagatcaatctcaatggattcatcggcggatagacagctttacttggcggttcaagaggcgattcggaaaaaccgcgaagttctggtggttggagacggaggaggatgtagcagtagtagtggcaatgttagtaattccaaagtgaagagatctttcttctcttttgggagcagtagacgttctagaagttcctctaaattgccactttattttgaaccctaa

SEQ ID NO: 2651 - DNA, 570 bp, Arabidopsis thaliana
  Clone ID: AT_F16G20.C1.o150.tg
atgggttgctgctgttgtctcccgagtatacccgaaagctcaagaactatagatgagcatcttcccttatctcgtgccacgccttcctctctctctaatgcatacagttcacctctttcgccgcctattcctttagccatcacgaatataaatcttcaaactagtccaccgaaattgccaagaactcagggcaattcgagtgaagcatccccgggactcacacaagttgttccagagaagaaaacatggcatgttgatgatctaactgattttgagctaaagaaacagtatcgagaagcaatcgatgaatgtccaatttgcttagaagaatatgagattgataacccgaaattgctcactaaatgtggccatgactttcatctcgcttgcattcttgcatggatggaaagaagcgaggcgtgtccagtttgcgataaggtttgtgtccgtttaaaatccgccattttcacaatacattttgaacttcttgagtcactagaatctgttttgacaatagagtctactttttgggtattcttttcacaggaattagtgctcactgaatcataa

SEQ ID NO: 2652 - DNA, 825 bp, Arabidopsis thaliana
  Clone ID: AT_F9G14.C1.o60.tg
atggcgtcactctctgctctttctccttcacacctcacgaatctgactcactccattctctctatctcccaccaccatcgccgccgcctcggtgcagtcctctcctctccgacccttttctccctcactctccgccacctcctctctctatctcttcctgacaaaactcacctcatcgccaaccatcttctctccctcctccatcctcttctcatccaccgtaaacaccactcctcctacgccgtcaccatgaagctccgggacctagacgcggtggtcctcctcctctttctctgcgaaacccaccagcttcatccagatgttctagaagcttccgctgataattggcgggaaattctcggtaatacgtactctaataatatgttaagtaataattccggtctttggacttgcgatgccggaatcttgatgccgtacatagaaaccctagttagatgcaaaagatttgttgacataatgggaggctataaccatcttcgtcgaagagatcaaaaagaaggctaccaagttccagccgctagagcggctgtggtggcgttacgggcggttgaggttttcaacgtcgccgcttcaaacgccggagaagtagaatgcgtgatatgcaaggaagagatgagcgaaggaagagatgtgtgtgaaatgccatgtcagcatttctttcactggaagtgtatcttgccgtggctaagcaagaagaacacgtgtccgttctgcaggtttcagcttcccaccgacgatgtcttctcagagatccaacggttatgggagatcctcgtcaagagtagcgagttacacgtggcgtaa

SEQ ID NO: 2653 - DNA, 600 bp, Arabidopsis thaliana
  Clone ID: AT_MOP10.C1.o7.tg
atgcaaaagcaaaacaaccggcgagtctttttctacccggtcactttctcaccgcgtttccattcaaattccgctagccatttttccatcacactagcgactttccgacgagacatctaccgtccgatcaccgggaaagaacgacttttcggacagacatcactaggtcgaccacttcaactcaaattcgagatctcttcagagtttctagcagcctccgacgtagaaacatgtcttcgacacgtgtctcttgttttggcggatgttgagccaaggattcgggagattctggttttgtatggcattcaactcatcggagaaagcagaggaagagctttcgagctcaaagctgaagcagaagatgttgaatatcacttgatggaagaaagtaaaggctggactacttgtatcccggccaaatcgattactccggtcaacgaatgtactatatgccttgaggaattatgccacgacgaagaatctatagagacacatgattgttgtcatgtttttcataaactctgtctttggcgctggattcggaccaaaagctcttgtcctctttgtcgtcatcctatctattcaagacccaagttttag

SEQ ID NO: 2654 - DNA, 588 bp, Arabidopsis thaliana
  Clone ID: AT_F14D16.C1.o27.tg
atgatgtgcatgaaatgcatgataattcagccagtaggtgctagttgctcaaatatttcatgtagttcatcaatgggaaaatattactgtaaaatatgcaagttgtttgacgatgatagggaaatctatcattgtccatactgcaatctctgccggctaggaaaaggactgagcatagactactttcattgcatgaaatgtaatgcttgtatgtcgcgactcatagtagaacatgtatgcagagaaaagtgcttagaagataattgtccgatttgtcatgaatacatatttacctcaaattctccggtgaaggctcttccatgcggtcacgtgatgcattcaacatgctttcaggagtacacatgttcgcattacacatgccctatttgcagcaagtcgctcggggatatgcaggtttactttagaatgttagacgcactgcttgcagaacaaaagatgccagatgaatacttaaaccaaactcaggtaatactgtgtaatgactgtggaagaaaggggaatgctccttaccattggctctatcacaagtgttcttcttgtgcctcctacaacaccagacttttctag

SEQ ID NO: 2655 - DNA, 2028 bp, Arabidopsis thaliana
  Clone ID: AT_T21L14.C1.o11.tg
atggaagagatttcgacggatccggttgttccagcggtgaaacctgacccgagaacatcttcagttggtgaaggtgctaatcgtcatgaaaatgacgacggaggaagcggcggttctgagattggagcaccggatctggataaagacttgctttgtccgatttgtatgcagattattaaagatgctttcctcacggcttgtggtcatagtttctgctatatgtgtatcatcacacatcttaggaacaagagtgattgtccctgttgtagccaacacctcaccaataatcagctttaccctaatttcttgctcgataagctattgaagaaaacttcagctcggcatgtgtcaaaaactgcatcgcccttggatcagtttcgggaagcactacaaaggggttgtgatgtgtcaattaaggaggttgataatcttctgacacttcttgcggaaaggaagagaaaaatggaacaggaagaagctgagaggaacatgcagatacttttggactttttgcattgtctaaggaagcaaaaagttgatgaactaaatgaggtgcaaactgatctccagtatattaaagaagatataaatgccgttgagagacatagaatagatttataccgagctagggacagatattctgtaaagttgcggatgctcggagatgatccaagcacaagaaatgcatggccacatgagaagaaccagattggtttcaactccaattctctcagcataagaggaggaaattttgtaggcaattatcaaaacaaaaaggtagaggggaaggcacaaggaagctctcatgggctaccaaagaaggatgcgctgagtgggtcagattcgcaaagtttgaatcagtcaactgtctcaatggctagaaagaaacggattcatgctcagttcaatgatttacaagaatgttacctccaaaagcggcgtcagttggcagaccaaccaaatagtaaacaagaaaatgataagagtgtagtacggagggaaggctatagcaacggccttgcagattttcaatctgtgttgactaccttcactcgctacagtcgtctaagagttatagcagaaatccggcatggggatatatttcattcagccaacattgtatcaagcatagagtttgatcgtgatgatgagctgtttgccactgctggtgtttctagatgtataaaggtttttgacttctcttcggttgtaaatgaaccagcagatatgcagtgtccgattgtggagatgtcaactcggtctaaacttagttgcttgagttggaataagcatgaaaaaaatcacatagcaagcagtgattatgaaggaatagtaacagtgtgggatgtaactactaggcagagtcttatggagtatgaagagcacgaaaaacgtgcctggagtgttgacttttcacgaacagaaccatcaatgcttgtatctggtagtgacgactgcaaggttaaagtttggtgcacgaggcaggaagcaagtgtgattaatattgatatgaaagcaaacatatgttgtgtcaagtacaatcctggctcaagcaactacattgcggtcggatcagctgatcatcacatccattattacgatctaagaaacataagccaaccacttcatgtcttcagtggacacaagaaagcagtttcctatgttaaatttttgtccaacaacgagctcgcttctgcgtccacagatagcacactacgcttatgggatgtcaaagacaacttgccagttcgaacattcagaggacatactaacgagaagaactttgtgggtctcacagtgaacagcgagtatctcgcctgtggaagcgagacaaacgaagtatatgtatatcacaaggaaatcacgagacccgtgacatcgcacagatttggatcgccagacatggacgatgcagaggaagaggcaggttcctactttattagtgcggtttgctggaagagtgatagtcccacgatgttgactgcgaatagtcaaggaaccatcaaagttctggtactcgctgcgtga

SEQ ID NO: 2656 - DNA, 681 bp, Arabidopsis thaliana
  Clone ID: AT_F27J15.C1.o35.tg
atggctgcaaatgaattagcttcttcttcagttcaagccttccaagagcaatcccttggcggttttgtctctagaaagctgcttctgcacaacccatttgaccacaacactcaaagagcctttgcagttgcaccatctcctctcataacccatgagaacaacctcagtggaaatgttctgatgcttctctcagtcctcatctgtggcatcatctgttgcctcgggttacattacatcattcgttgtgcattcagacgtacttcaagtttcatgatctctgagcctatagccggtctttcaacaccatgcggttcatcaaacaaaggaatcaataagaaagctcttagaatgttcccagttgtgagttactcacctgagatgaacttgccggggcttggcgaagagtgtgtcatttgtttgtcagattttgtttccggtgaacagattaggatgctacctaagtgccaccatgggttccatgttcgttgcatagacaagtggcttcaacaacatttgacttgtccaaaatgcagacactgtctggttgagacatgccaaaagatcttaggtgacttcagtcaagctgatcaagtggcagcaacaccaacagcgagcgtaattgtcaggattgctcctctggaacctgaaggaagagtaaacattttaagagaaagcagctag

SEQ ID NO: 2657 - DNA, 1527 bp, Arabidopsis thaliana
  Clone ID: AT_F10C21.C1.o23.tg
atgtcttatagtaattcaaacccggaaaattattcagctgcaacgagctcgccggagcttaaactatatcaagcatttatcttttctgttccaatttgtttcacatttattattctcttcttgttttacttgatctacctccgtcgtagtagctctgatttgtcttctcttggaatgcgaactactttcatccccgggaactctctctccacgattgaattaggattgagcaaagagctgagagagatgcttcccattgttgtctttaaagagagcttcaccgtaatggattcacaatgttcagtgtgccttggggactatcaaccaaatgacaagcttcaacagatcccggtatgtaaacacacttttcacatggactgcattgatctttggctcacatcacataccacttgccctctttgccgcctcgctctaatcccgagtcgttcccgtcaaagccaagatgatcctgttccgagtctcgtaagccctgatgaagaagtgtcgagtcaaccagaatctgagccagtaaaccacagagtagtgtcgactcaaccagaatctgagccagtaaaccacagtggagtctcgagtcaaccagaatctcagccagtagtaaaccacagaggagtctcgagtcaaccggagtctcagccagtaaaccacattaacgatggccatgagcagcaatgtgatcaagatgtagagggctttaaggaaatggaagaggacgaacgaaacaacatcgggacatcgagtgcttgttgtagttgtagaactgttcactactgttgtgtctcaagagacaatcagattatgtacgcttacaacaatgccggagaccaccgcaacaacgagagtcttgcagcgttatgcttggaaaagactccaccttttcacaagtggtacttcgaaacgaggggtaagaagacttttggattcttgatgaaagatgacttcgtttatttcgccattgttgatgatgttttcaagaaatctagcgttcttgattttcttgaaaaactgagagatgagttaaaagaagctaataagaagaattctagaggaagtttctctggtagtatcagttttagcaatgttcaagaccaaattgtccgaagactcatagcttcattagagtttgatcacacttgtcttccattatcatcaccttccattgatggtgctgaacaaagctacgcatctaactccaaagctcctcttttaggaagatccaacaagcaagataagaagaaagggagagatcatgcgcactcactaagaggtattgagatagaggaacaccgaaaatcaaatgatagaggaaacgtaacagaatgttctaatgcttcatctgaatcagcaacgtatgttccaagaaggggacgatctggtggctctcagagcattgagaggaagtggcggcgtcaagtgaagattgttcttgccattgatatagctatttgcttaacgctgcttggtgtttggttggctatttgtcatggcattgagtgtacacgttcttga

SEQ ID NO: 2658 - DNA, 480 bp, Arabidopsis thaliana
  Clone ID: AT_T20L15.C1.o150.tg
atgcatcgactgctactggaatcccacggcggcgggaacgagacgagcggaagcggcgggggagatgggtacacgagggacatgaacttcgacgcaaacatggtgatcatacttgcggctcttctctgcgcgctgatactagcgcttgggctgaattcgattctccggtgcgcgatgcgatgcggtttcgggttatcatcctctgcggcggcggggacggtggccgacagagctggattaaagaagagagaactgaagaagtttccagtagctgagtacgggtcgggggaagtgaagatagcggcgacggagtgcgcaatctgtctgggggaattcgcggacggcgagagagtgcgagtactgccgccgtgtaatcacagtttccacatgtcatgcatcgacacgtggcttgtctctcactcttcatgtcccaattgtcggcattcactcatcgaggtccacgtggcggggtctgagtga

SEQ ID NO: 2659 - DNA, 4740 bp, Arabidopsis thaliana
  Clone ID: AT_F8K7.C1.o29.tg
atggaggaaccggagtgtccggtgtgtctacagtcttacgacggcgagtctactgtcccgcgcgtactcgcctgcggacacacggcgtgcgaagaatgcttaacaaatctacccaagaagtttccggacacaatccgatgtcctgcttgcaccgttctcgtcaagtttccacctcaaggaccatcagctctccccaaaaacattgatcttctcagattgttcccttcgatttcgaagcttaagctggaacctggccggaattttgaaaaagtcgttgaatttgtcactcgatcatggtccgacgacttttacgccacttggaaggatcggattctagtgcacgacgccgtttccgtggaaattagggagagtgaaagtagtgattttgattcatcttcgcgtttatgtggaagtctgagggatgattcgaaggtgagtcttttacgggttgcttcgttcgagcatggtgattgtgattctgtcctcaagtatagttatgtccagaggatgatgagttgtctgtggggtatgcgagaggaggaaagagatgagcttgatgcgatcatctctgttaaacagagaggtgtttctaaagtttttggcttgtggggtgatttgaagaatggtgttttgtatttagtgggtgaaaagctcattggattttcgttggaggagtttgatagcctcgaagatgagactttacgtttaggaataattggtatgcaaatatgtgaggcactacttaatttgcataaggaagggttgatcacaggctgtttgagtgtttcttgtgtgaagtttgacgaatatgagaatgcttatgttgatttgattgagttgattgaaactggaaggaatgtgtatcgaattatcgctgaagaaactagctctttgagaaaaccagttggtgcttcggaaatgggtttgatttttgttgggttacaacagaaggggatttttattagctcagaggtgttgtttgaatttttgaaagaacagaatatgttaataaaaaataccagctcaaaatcttttgtttcacataactctgatgtttggccagtgtgttttcttctcctcaagcttcgtcttggaaaacggtgtaccgaggagtttattgaaagtgtgaattgtgtggatggaaaaggctgtgaagagggtattgaggatatcttggtgctatacacaggtattacggagaaactaagtttggaatctgaactccaagggaagtttaaatcgatggttgaaattcttcgtcaatgttgctgtcttgatcctcaggcacgtcccgttttgactgatctatggaaatgcatcagggagctggtcatgaaacctaggttcaattctatgagtagattgcataagacgatttatgggaaaaggaaacagttctgtttggctcaaagtgaattatgtcgcctggtagaagtggaatccaaagaagtggacaaagagttgcctggaatgaaaattggcgatgaagcagaggagggtaaggttgacatagattttccggggagagtctcagaaggaaaggtgagatctaaagacatgcggggacaccaagactctgtcacaggtttagccgttggaggtcatcaggataaagtaatggccttgatacacatcgagggaacagaaccagtatgtgttagtggcgatggtggaggaggtatctttgtatggagcactacttttcctctggaagaacagccgctaagaaagtggtatgagccaaaagactggcgatatactggcattcatgcattggcatactcagaatatgggcatgtgtacactggcagtggagataacactatcaaagcttggtcactgcaagatggaagcctgctttgcactatgagtggtcataaatctgtagtctcaacgcttgttgtggtaaatggagtactatacagtggaagttgggatggaaccgttcgtttgtggagtctaagtgacaacagtttgttgacagtgttgggggaagagactccaggtattatatggagggatgatacattgatgaagtcaatgaaaatacagaatggcgcaatcctcagcattgccgtgaatggtaaatggctattcactggaggttgggacaaaaccatcaatgtacaggggaatttgggtcgtttgaagaggaatgtacaagattttacgagcatgaattattgggttgtccgggactactaccgtctggtggaatctgtcaattcccttgaaccacagattcaaagcctttccgatgaacagctgaaagctaaaactgctgaatttcgagaaagattagcacgaggggagtccctagcagatatgcaagctgaggcatttgctgttgtccgtgaagctgcaaagagaacaattggaatgcgtcattttgacgtgcagataattggtggaggagtgcttcatgatggatccattgcggagatgaagacaggtgaagggaaaacactagtttctaccttagctgcatatcttaatgcattaactggtgagggcgttcatgtggttactgtgaatgattacctggcacagcgtgatgctgaatggatgggtcgtgttcaccgcttcttaggcctttcagttggtctcattcagagagggatgaaagctgaagagagaaaattcaactatagctgtgatataacatacaccaataactcggagcttggatttgattatctacgagataaccttacttcaaaccgtgaacaacttgttatgagatggccaaaaccatttcactttgcaatagttgatgaagtggactcagtcctcattgatgaaggcagaaatcctttgctaattagtggtgaggctaacgaaaatgccgcacgatatccagttgctgctaaagtggctgaacttctcgtaaaggatagtcattacaaagttgaactgaaagaaaactcagtggaactcacagaagaaggcatatctcttgctgaaatggctcttgagacgggtgatttatgggacgaaaatgatccatgggcaaggtttgttatgaatgctttgaaagctaaagaattttacaagcgggatgtccaatatattgtgagagatgggaaagcacttataatcaatgagttgactggaagagttgaagacaaaaggagatggtctgaaggagttcaccaggctgtggaggctaaagaaggtctagaaattcaggctgattcaattgttgtggctcaaatcacctatcagtcgctctttaaactctatccaaagctctccgggatgactgggacagcaaaaacagaagaaaaagaatttttgaaaatgtttcagatacctgttattgaagttcctacaaatttgtcaaatattcgaatcgatctaccaatacaagctttcgcgactgctcggggtaaatgggaacatgttcgtcgagaagttgaagatatgtttggacaaggtcgacctgttttagtaggaacaacaagtgtagagaattctgaatatttatcagaactgctgaaagaatggggtatacctcacaatgtcctgaatgcacgacccaagtatgctgccagggaagctgattttatagcccaagcaggaagaaaatatgccatcaccatttccacaaatatggctggtaggggtactgacattattctgggaggaaatccgaagatgcttgcaagggaaatcatagaagatagcatcctttcatatctaacgagtgaagttttggctgataatattgacgatgatgagttatcacagaaggtattgtcaaaaataaaagtaggaccatcgtcattagctttgctagccagagcttctcttatggcaaaatatgttggcaaaagtgaaagtaagagctggacaaggaaaaaagcaaagtccgtggtcacagaatctttggagaaaagccagaccatggatcctatggaactgcagaatcttatcaatgagcagtcagagatgtacccattaggccctgctattgctctggcttatctgtccgtcttaaaggactgtgaggcccattgtctgcatgaagggtctgaagtgaagaggcttggaggccttcatgtgattgggacttcattgcatgagtctcggagaattgataaccagcttcgtggcagagctggaaggcaaggagatcctggatccacgcggtttatgataagcttgcaagatgagatgtttcagaagtttaattttgatactgagtgggctgtgagacttatatcaaagattacaaacgatgaagacttaccaattgaaggtgacacaatagtaaaacagcttctagctctccagatcaacgcagagaaatacttctttggcataagaaaaagcctggtcgagtttgacgaagtgctagaggttcaaaggaagcatgtctatgacttaaggcaactgctgttgacgggtgaaaacgaaagttgctctcagcatatattccagtacatgcaagctgttgtagatgaaatcgttgttgggaattctaatccgcagaagcatccaagatactggagcttggccaagttattgaaagagttcatggctatttcgggaaacctactggatgaagagaccatgttacagtcccttgaaaacctgcatgagggaagttcaatagaaatggaagacttgtcccttccgcacctgccaaaacctccaaacgctttcagaggaattcgcaggaagaattcttcactaagacgttggcttgatatctgctccgataatttgacggggtga

SEQ ID NO: 2660 - DNA, 399 bp, Arabidopsis thaliana
  Clone ID: AT_T14L22.C1.o90.tg
atggatactattgacgaaattctcattggtttctccatcatcggcttgatcgtcatcgtgattgctaactgttgcgacaatatagatccccctcccacgagattacctcccgagacaatccatcaaactgtacagcctcaacaagacattgaaaccggacagagcaaagccctagtgttcaaagatatcaaagaagaagaaggaggaagagaagaagaaggtggtggtaaacgtttttgtccaatttgtttggaagagtacgaggatgatcatcagattaggcgtttaagaaactgtggacatgtttttcatcttttgtgtattgattcttggcttacacagaaacaaaactgtccaagttgtcgccgttctgttgatttgatgagtttaggtctttag

SEQ ID NO: 2661 - DNA, 1488 bp, Arabidopsis thaliana
  Clone ID: AT_F4D11.C1.o200.tg
atgggtgtttctcttctgaaacaacaacatcgtattacaaatcaagctgatactttttctagattcatggaaagatcaccagagaataatctaagcagaaatgagcacatcatcattgacattccaagaaatgccgccattgcatcatcatcatcttctcatgatagaatctcaaatgttttggaacctttacaacatgaggaagagagaccttctactgtttctcccatggctgctcctcagccagctacagctacagcttcttcttcttcttctatgcgatcaaatcctagaagtgtccgtcgtagaagaagtcctttgaattctggcttatggatttctattgaactattcctcactgttggtcagatcattgcagctattgtcgttttgtctttgtcaaaacatgagcatcctcgtgctcctttgttcacttggattgttggttatgcgtgtggatgcgttgctacactcccgcttttgtactggagatattatcattcgaatcaggcttctgaacaggattctggtcagcaccgtcctaatcttaatgttgcagcaggaccattcgccttctcgatatccaggacatccgaagcagatggtcgacagaccaataccacctcttctcgtggtagtagatatcctgggtttataagtgctgccagacttaaagttatcgtggaatacttcaaaatggctctggattgcttctttgcggtgtggtttgtggtaggtaatgtatggatatttggagggcattcatctgctgccgaggctcctaacttgtacaggttatgtttagtgtttcttacctttagctgtattggctacgcgatgcccttcatcctctgtacaacaatatgttgctgcttgccttgcataatctcaattctcggatatagagaagatttaacgcaacctcgaggtgccacacctgagtcgattaatgcgttgccgactcataaatttaagttgaagaaaagcagaagtaatggcgatgacaatggttcaagtactagcgaaggtggagttgtggcggctggaacagataacgaacgagctatttcaggagaggacgcagtctgttgcatttgcttagcgaaatatgcgaataacgaggagttaagagagcttccatgctcacatttcttccacaaagagtgcgttgacaaatggctgaagatcaatgcctcttgccctctatgcaagagcgaagttggggagaagaactctgatttgactagccaagggatcttaacctcgctctcttctggggaaaacgataaccatcaacaacagcaacaacaacaacggagtgaacttagagttgagaatgatcttcgagatttgctctatgtccgagaaaacggcaaattagccgtttggcgatgttcctacacaaaatggggtttgcttctcattgctaagaaggtgaagaaagacacggcgaagatcctgttctgtaaatgctttttgccgttgtga

SEQ ID NO: 2662 - DNA, 1071 bp, Arabidopsis thaliana
  Clone ID: AT_T12J13.C1.o17.tg
atgggttcaacaggaaaccctaatccatggggtacaacatacgattcatacagagactgttctcaaggagtatgcagtgtctattgccctcaatggtgttacgtcatcttccctcctcctccttccttctatctcgacgacgaagacgactcttcctcctctgatttctctcctctcctcatcgctctcatcggaatcctcgctagcgccttcatcctcgtcagctactacactctcatctccaaatactgccaccgccgtcgccacaactcctcctctacctccgccgcagctataaacagaatctcatcagattacacctggcaaggaaccaacaacaacaacaacaacggagctacgaatccgaatcaaacgattggtggtggtggtggcgatggactcgatgaatctctgattaaatcgataactgtttacaaatacagaaagatggatggatttgttgaatcttcagattgctctgtttgtttaagcgagtttcaagagaacgagagcttgagattgttacctaaatgcaaccacgcgtttcacgttccttgtattgatacttggttgaaatctcactctaattgtcctctctgccgcgccttcatcgtcacttcctccgccgttgagatcgtcgatttaaccaatcaacagatcgttacggagaacaactcgatttcgaccggagatgattccgtcgttgtcgttaacttagatctggaaaattctagatctcggaatgagacggttaatgaaggatcgacgccgaaaccaccggagatgcaggattcaagagacggagaagagcggagatcggcgtcgttaaactcaggcggcggtgtggtatcgatcgcagatatactaagggagattgaagacgacgaagaatcagcgggtgtaggaacttctcggtgggtagaagaaggggaaggagagaagacgcctccgccgtcaggatcggcggcgaatcaaacaaacggaatttcgaattttctggttcggagttcaatggcggcgatgaagagatctggttacgatagagcaaaaaattaccgtttaccgaaataa

SEQ ID NO: 2663 - DNA, 1149 bp, Arabidopsis thaliana
  Clone ID: AT_mzn1.C1.o240.tg
atgaataacagagctttagattatcctcgggagaaggatggagcgcgcgttcagatgagattatcatacagcccgactgctcaattttttctttttcttgtacaatggactgattgtaagcttgctggtttcctcggtttactcagagttcttatttatatgacttatgcagatgggaaaacaaccatgtcggtttacgaaagaaaagccagtattagagagttccaagctgtgatattaccatctttgtcacaactacaaaggggtgttacagacatagatgacagcaaacaaaaagaggtatgcaagatgcgatacagaaagaaggatgagagcgaaatgtcggagattgagatcgagagggaagaagaatgtggaatctgtatggagatgaacagcaaggtggtgctaccaaactgtactcattctttatgcatcaagtgttaccgcgattggcgagggagatcacagtcatgcccgttctgcagagacagccttaaaagagtagattcaggtgatctctggatgtttttggaccaaaacgatacagtgaatctcactgcaatcgctagagagaaccagaaacgattgtttatgtacattgagaagttaccactagtggttccagatcaagtgtatgcgtcttctccttacgatttccatgtgaagaagacgcagagcattaacgcgaaagaattagatctagggatttacgacgaagcatcttggcacgccaagtacaaagattcagcctacgtttacgtcggagaattaccttacgatctcacggagggtgacctcctcgccgttttctcacaatatggtgaagttgttgatttgaatcttgttcgagataaaggaactgggagatcaaaaagatttgcgtttgttgcttatgaagatcagagaagtactaatcttgctgttgataatatcaatggagctaaggtgttgggaaggataataaaagtggagcattgtggtaaatacttaaagagagaagaggaagatgaagagacgaagcagaagaagagagaagctccgtggtgtttgcagagcttttcagagaaaggagtgtactcagagctgccaataccgggtggggtcacgaagatcgtagaagttccaagtgagagatcaagtaagtaa

SEQ ID NO: 2664 - DNA, 855 bp, Arabidopsis thaliana
  Clone ID: AT_T12H1.C1.o22.tg
atggcggcgaaggagatcgccggcgggagcggttctattgacgatggatccgattttgatccatgtcctatttgccttggacaattcctccgtgaatcctaccttgatacctgtttccacaagttttgtttcaattgtataaaacaatggatcaaagttgtttcaagcaaggcctctaagcaacgttcctcagtgacatgtcctctctgtctgcttcttggaaacgctcttttctgctcacaacaccttgaagaacttgtttacaggaatgaccataacttatgcagacagagaatttatccatcatccacaactacgatggatgttcttttgagcggcattatatcgacccgaatattccagatgggtttcctcgccgatgtattcgatgttgcacggttttggaagctgcaaaagtttctccagccgaaccggtgccttgaagcctggttgaggagggagcttcaagctctgatgcaggaggaagatgttgatattgttctgcatcatttggtcggtgtgatggaatccttctgcaaaagaatcaaacagagacgcaaacaagaaacaagaagcgcagagacaacaaatcaagaacaattcaaagcagttgtctcagaagcagcacgtccatttgtaatggcgagaacagaccgatttgtggatgaacttgaactctttctggccgcgggactaaacttggaggcttatgatgcaatctataagcagggtttagaggggaacaaccgaagagagatcggtgcagctagtgaagaaagagaagaagtggaagaacataatgtaagaacacgagtgactccttatttgtttatcttcgaggaagactcagactga

SEQ ID NO: 2665 - DNA, 1461 bp, Arabidopsis thaliana
  Clone ID: AT_K9L2.C1.o3.tg
atgtctgtcaagaataatagcttctcgtcggctgagattcccgatgtggcagaccaaccacgcgaccgatttaaccccgaagctacacaggatctacaagagaaggatgagacgaaagaagagaaagaaggagatgaggaagtgaaacacgacgaagcggaggaagaccaagaagtagtgaaacccaacgacgccgaggaagatgatgatggtgacgatgcagaggaggacgaggaagaagaagtagaagcagaggaagatgaagaagcagaggaagaggaagaagaagaagaggaagaagaagaagaagaagaagattctaaagaaagaagtccatcttctatatctggagaccaatcagagtttatggaaattgatctaggggaaatccgtaaagacgtgcagtgtccaatatgcctaggtattataaagaaaacaaggactgtgatggaatgtctccacaggttctgccgggaatgtattgataagtcaatgagattggggaataacgaatgtcctgcttgcaggaagcattgtgcaagccggcgttctctaagagacgatccgaaatttgatgctcttattgctgctttatttacaaatattgatagttatgaggaagaggaactggcttttcacgaagatgaaatggctcgtaataagcagattcaagcatctatagctcagatatcgcaacgacaatctgaggctcttgtgaaaagacgatctcttggtaaagaggcagcagtcttaatgagatcaccgcgtattgctagtggctccagaaggagacggaacagcagaaacatggaacaacaaaacgcatcagaagctcatgaagatgatgataatgatgataataacaacagaggaagagacaaagattcgtcttcagatgagcgtggtacagaagtccggcagaagaaacgtagaaaacggtctacaagtcgttcaacacaacacccttcttcttcaggtgcaaacaaaaacaatggtaactgtgcagataacgacacagaagtgtatagagacaccaaaggcatatctcccgggcttgtgtggaatcccgagatactggcttggggaagaggcgggacaaggagtaacacaaggcatgggaataatacttctggaggtagtagtaagagtgtaaggaatgcccgtgtgaacaaacttgttgaatatctacgcagcagcgtagatggatctagtgttgagttcgttgcacttcagatacatttgaagactgaagaggttgaattgttagtaacaagaagaagagtaggagaagatgcggcaatagagaatcttcctgcagtgactccagcttcagcagcagcatctaaagatgagatgctgagtttggaagacaatgaaacattgtcaaggctcaaaatcgatttcatttcaagccatgaacaacatttgatcatagcttaccggaagaagcaaactgagtga

SEQ ID NO: 2666 - DNA, 486 bp, Arabidopsis thaliana
  Clone ID: AT_F15H11.C1.o24.tg
atgagtgagattgaagagctcgtgtgtattgaagcaagtgttacgcgcaaatctacatcaaacacggtggagatcagagaatcgcgtcgaaacaaggttactttaggatcaagcgattctcctgcgttcccgacccctcacctctttttgaaaaacatcgtgagctttgatgaacaaagcatgtataatcttctctatccaaggctccaagatcccaacttatgcagtattctctccttcaagatcgctttcgaagccaagcgagttccagggccgttgtacatctcctatgacgtcacattaaccccacaaatattcgaggaaccagacatggaaacatgcggtctttgcttgttggaggaacagcacttattcgacatgccaaattgtgcgcatgtgtttcatggtgattgtatcgataagtggttaagtacaagtaataattgccctctctgtggtgttgaaattatggatgacgacgagtga

SEQ ID NO: 2667 - DNA, 933 bp, Arabidopsis thaliana
  Clone ID: AT_F22D1.C1.o80.tg
atggatgcatcgtcttcaccgtctccttccgaggaaagcttgaagcttgagcttgatgatcttcagaaacagctgaacaaaaagctgagattcgaagcatccgtttgttctattcataatcttctccgtgatcactactcttcttcctctccttctctccgcaaacagttctatatagttgtatctcgtgtcgctacggttcttaagacaagatatacagctactggattttgggttgctggactgagtcttttcgaagaggctgagcgacttgtctctgatgcttctgagaagaaacatttgaaatcttgcgttgctcaagctaaggagcagttaagcgaagtagataatcagccaacagagagctcacaaggttatctttttgagggacatcttacggttgatcgtgagccgccacagcctcagtggctagtacagcagaatctcatgtctgctttcgcttctatcgttggtggtgaatcctctaatggtcctactgaaaacactattggggaaactgctaacttgatgcaagaacttatcaatggtcttgacatgatcattccagatatactagatgatggtggaccaccaagagctccaccggcaagtaaagaagttgtagagaaactcccagtcattattttcaccgaggaattgcttaaaaagtttggagcagaggcagaatgttgcatctgcaaggagaatctagttattggcgacaagatgcaggaattgccatgcaagcacacatttcaccctccttgcctaaagccttggctggacgagcataactcttgccctatatgccgccatgaattaccaacagacgatcagaaatacgaaaactggaaagagagagagaaagaggccgaagaagagaggaagggcgcagagaatgctgtccgcggaggtgaatatatgtacgtttaa

SEQ ID NO: 2668 - DNA, 1398 bp, Arabidopsis thaliana
  Clone ID: AT_F17I23.C1.o260.tg
atgaaatgggttttcccagaaatcaaaacaactcagaatttcctctctccttcatcacttccacaagaaccaccgttatctctccgctccagcgcaaacttcgatctaaacagcaaaatcagtccaagtattctcctcataatcataatcctctcaatcatcttcttcatctccggtctccttcatctcttagtcagattcctcctcacaccatcgagcagagacagagaagattacttcgacaacgtcactgctcttcaaggccagcttcaacagctttttcatctccatgattctggagttgaccaatccttcatcgacacgttacctgttttccattacaaatccataatcggtctcaagaactatccttttgattgtgcagtttgtctttgtgagttcgaaacagaggataagctcaggctcttacctaaatgcagccacgcctttcacatggattgtatcgatacttggcttctatctcactctacttgtcctttgtgtagatccagtctcctctctgatctctcttcgcaccaagatcctcgttcttctttcctccttgtgctcgagtctgcgagtgatcatagctcgagagagattggaggagatagagacagtgcagcttgtgtggctgcaaatgatgatattgatgtgtctagtgctcatcttggtttggtcggaaacaatgatcttggatcaaccaggatagattcgggtcacggagatcagtacctggatggtgaattgggtggttcggttggaaaggttgttcctttttcagttaagctagggaagtttaggaatatagatattggtgaaggaactagtagcaacaacaacattggtaatagtagtagtttagatgagaggaggtgtttctcaatgggatcatatgagtatataatggatgaagaaacgactcttaaggttcatgtttcaaccaagaaacaatcaagcaagaaccgtggcttgcccggtcataggacagcgatgtccgaatgcgggtttgatccaacagggagattgaaattcagtgggagtggatcgatgaggatagtggaagaagcggccgagaagaatgtagtggaaagagagagcttttcggtatcgaaaatatggctaagggggaagaaggagaagcatagtaaagttcaaggaaaagaggatagttcattggtttcttcgtcttcgggaagagcattctctttcaggttatcgaaccagcggaaccatcccgatgcgatgatcgaaagtggttgcgaagaagataatcaaaagtgcgaaaactcggagtctttggagactaaaacaccatcttttgctaggaggactatgctttggcttgcagggagacaaaacaaggttgttcattcttcttcttcaactaatgtctag

SEQ ID NO: 2669 - DNA, 1038 bp, Arabidopsis thaliana
  Clone ID: AT_F23J3.C1.o150.tg
atgaatatcttcacgagatatcaccttcctcgggtcgtatcaggtgttatattgccgctcttccttttccatcttttgccttacgttacatgtcagcaagagtcggtaccaacaaacagcattagacaaaccaatctctcagctgactcaataattgcaatcgttgtgcttgcaatatttatatcattaggcatggtctcttgttgcttgcactgcatattctatagggaagagattggggcggcaggtcaagatgtattacacagtagagcaaggcgtgggctcgagaaggaagtcatcgagtcttttccaactttcctttattcagaagttaaagggctcaagataggcaaaggcggtgtagaatgtgcaatttgtctgagcgagtttgaggatcaagaaacgctacgttggatgcctccttgtagccacactttccatgctaattgcatcgatgtgtggctctcttcttggtccacatgtccggtttgtcgtgcaaatctgtctctcaaacccggtgagagttatccatatctgaacatggatgttgaaacgggaggtgttcaaaaactccccaatgagagaagcttgacaggtaatagtgtaacaactagatcgagatctacagggttattgtcgagctggcgtatggctgagatattcgtccctagatctcattcgaccggacattcattggttcaacaactaggtgaaaatctagaccggttcacattgcaattaccagaggaggtacaaagacaattagttagcttgaatctgataaggagaagccacatagtcttacctcaagccgtgagttcgaggcagggctacaggagcgggagcgttgggagcgagagaggtggtttctctcagggacggcaaacgcaccgaagggccttatctatgtctttctctttctctttccaaactgcttctgttcggtcaatacatgacatgaatgatcaagcccaagctaaggacaaatattttggtgaacggtcatttgaacgccttatgccagaggagaaggtctaa

SEQ ID NO: 2670 - DNA, 1074 bp, Arabidopsis thaliana
  Clone ID: AT_F16J13.C1.o220.tg
atgaatgatcccattcccaaagccgtagtgagcgttcaggtccaagctgagagagtctctcgctctccatcacaaggaaatacaaactcgatcttcctcatcgtcaataccattaaggatgagatccttataaaccctggcactggccatcgaaccgcaacgtccactccgctttcctataaatcacttcccatcaattacactctccctagttgtagtcaccaccacatccaatcgttactccatgatcgactccatagagacgaccattggttgtgcgatcacttagtcccaaagatctcaagtgctatcagctcaggttttgttgacttgaccgtgagcgtcgcggttacttacaagtacgtccgtgtcgacgaggcagcattaaagatatcgaggatggttctacaagggttcatgagcgtagaggaaacaaagagtttgaacgcagagtcgtgttccatttgtctccagagtctagtctccagttcgaaaacagcacccactcgcatgagttgttcccatgtcttccacaatggttgtctcgtggagtggctaaaccgcaaaaacacttgcccgatgtttcacatgcaacttatagactcatcaatgttttcctcaacagactacacagcttatattgtagaacattgcaaaagacatgacttctcctcaagtggaagtacacatgtccgttcacgttatatcaatatttgtcgttctactcacggccacatccgaaagcttctccacaatcaattcctatccacaatcagcaacccttggcgttccttgtgcgatttcttatccccaaagatctcaacggagtttatcaacttaggttttggacgcaacggctttaccttgaccatggacgctaaagttacttaccggaccgtctccgttacgtcaaacgacgagaaatcattgaggacaattctagtcgggaaaataaaagcagaggaattgaagagtttgaagatcgaaacagagcggtgttccatctgtctcgagagtctagtctccggtccgaaacctatcggcttaacacgaatgccatgtttcatctattga

SEQ ID NO: 2671 - DNA, 1215 bp, Arabidopsis thaliana
  Clone ID: AT_F4I1.C1.o22.tg
atggatcttgatttgaatcaagagccgtcttctgattcggagtctccgggtggtttgatgacggcgctttctccaatgttagaagagcttgaatctgctcaagagcggattcaagaacgcataagacagcttgaagtgatagtttcgagaatcagggaacgagaaataacaacaacaacaacaccggctttggtgtcgcctaacgaacatagagattcaactgctggagttatacatgagcgttctcgagagagacttgtcgaaaatggcgaaaacaagacttatttgatagccaaggcattgaacatggagaaaacaagctctgttcctggtggcttctttgactgcaacatatgtttagagaaagctgaagatccgattttgacttgttgtggtcatttgttctgttggggttgcttctatcagttgcctttaatttacttaaacataaaggaatgtccggtttgcgatggggaagtgactgacgccgaggtgattccgatatatggtaatggagatgattgtgatggtactaaaccaaagttagaagattgtggtattagtctacctccaaggcctaatgctaaaagagtggaaagtgttcgtcaaaagatcataaaccgagggaaccctttcttccctgggcacgaaaacgaagcaatcgaacatattagaagaactattgattccataggactacaagctttagctcaaggcgatgagtttggtttgacaaacataataaacaatggaggagacaatggtggacaacaacaacaacaacaacatcatcatcatcatcatccgccttttggacctttgaggttattgccaccatatgctactttcccaggtcttctagttgatacctcagacataccagcaccctttgatgatgatgcttttgatgttgatagttttgttgacacaactagtttgagaagaaaccgtagaagaccttcaccagccgtacgagcttcttatcagagaaaccgaagtaacaatgcttctcaaacgatttcgttcaggctcggttcttcagcttcatcagcacctagagagtttgctgttccaagctcctccattatgacgagaagccaaactgtaaaccctactgaagtggttacttcgagtacttcagcttcatcgtctaggagaagaacagaagatgtaaacaatggacctcggaccaggtctagaaggaggctgaggtaa

SEQ ID NO: 2672 - DNA, 627 bp, Arabidopsis thaliana
  Clone ID: AT_MNJ8.C1.o20.tg
atggatacatatagtaattgggagtccgtagagattactacaacagcaatgatcctaccacaagatcaagggtttagaaacaccgtgttcgtcaatctacacgatgtggtcaacgagttagctgaagatcaaaacggtgtcgtaatatgtctgggaacgttcgcggctccacttatgactaaaatcgaattgaaaccatcatgcctcagttcacaccacatctatcaagaccttgacaagttcatcacacatactgagttttgtcgattgttgagcgaaaggatcgttttggattgtgctcatattccccaaccttttagcgtgtccttttacgtgagagtgacaagagatgttatgttaccgtctattgttgttcggtcgagagatatgtttcaaagattgcttgaggaacaaacaatggaattgactaatttgggagatgaagaagaaaccacttgttcgatttgtatggaggacttttcagagagtcatgatgataacatcattctgttgcctgactgtttccatctgttccatcaaagttgtatctttaagtggcttaagcgtcagaggtcgtgtcctttgtgtcgacgtgtaccgtacgaggaagatcttgaaacagagtga

SEQ ID NO: 2673 - DNA, 543 bp, Arabidopsis thaliana
  Clone ID: AT_F4I1.C1.o14.tg
atgtcgtcctcctctacccaaaaccaattggagatgcgggattacacgtgtccggaatgtaacataggtcttagggttctctcattgccttccgcttctcctccatactgtcctctatgcaatgtcgcttcttacttcacttcttcgaccccttttgaagtaggtcctaatcctttcgaagacgatgaggaatctcagtttctcgatcccatggaatctcttccgaccattaagatctcatcttcaatgttgtcttccgcttcctcagacgattctgctttaccatgtgccatttgcagagaagatttcgtggttggagaatctgctaggagattgccatgcaaccatttataccataatgattgcattattccttggctcacaagtcataactcgtgccctctctgtcgagttgagctcccggttgcatctagtgaagacgatagtggtctggacatgtggtttgatgctttgaacctagaggacgacttggaggaagaagcgggagtcacgctcgatttggagcaaagtttagacggctaa

SEQ ID NO: 2674 - DNA, 1107 bp, Arabidopsis thaliana
  Clone ID: AT_F2H15.C1.o16.tg
atgtcttctacaacaatcggcgagcacatcagactccgacgagctagaaaccaaacaatccgtcatctccacgccgccgacgatgatccgccgctaagccacgtcgttcttccgatttcacaacctaatcgcttctgtaactccgcaatgtcttccttctttcccctcccgacttcctcctccaacgaaagcacgaggaagaaaccgtaccaaacgtcgtcgtttcgagggatgggttgctatgccgcagcagcagcagcagctcaagaggtttctgttccctccgtcattcgctactccgcggatttggatgccagaattagaaaagataagaagaagaagaagcataagcataagaaaaagaaaaagaagaataaaggaagctacgaagatggttcgattaggattttaagcgaagaagctagagacgttattgatgtttggtgcagacctggattaggcttctccacggatgctgtaattggtcgatcggttgatcctcctcggggaaggaatattccgtcgtctcgtcgcaaaattgatgtggataacaacaattataatcacacactgggttcttctgttcttcccattcggtttctcaatcaagaaactcattctcatgatatcttcaactctgattctacttttgtgacatcatcacgcgctgaaccaacgatgttgtcaagtagatgtcgtggccatcttccacgctcttaccctgatgatcttaccgagatgaggatgctccagaatggttttgtaatgggaagaataacagattcccgtgataactaccacgaattgaggctcgatgttgatagcatgtcatacgagcaacttcttgagcttggtgatagaattggttatgtgaatactggactaaaagaaagcgagatacatcgttgtcttgggaaaatcaaaccatccgtatcacatactcttgttgatagaaaatgtagcatctgtcaggatgagtatgagagagaggatgaggttggggaattgaactgtggacacagctttcatgtccattgcgtgaaacaatggctttcgaggaagaatgcttgtccggtctgtaagaaggcagcatatggcaagccttaa

SEQ ID NO: 2675 - DNA, 1137 bp, Arabidopsis thaliana
  Clone ID: AT_T16G12.C1.o120.tg
atggggatctccttaagcaagcgtcgacgagacaacaacaacaaccaccaccatccccaccacaatccgccgtactattactccgatcctccaccacaacaaccgccgcctcaaaacgggtatagctactctcacaattaccccgtttcaactccacagctctctcttcctccaccaccggctcagccaccgtcttcttctcagcctcctccgtcgcagattagttaccgaccgtacggtcaaaactaccatcaaaaccaatactacccgcaacaagctcctccgtatttcaccggttatcatcacaatgggtttaatccgatgatgaggccggtttatttcggtccgactccggttgcggttatggaaccgcctgcaccttatgtggagcatcagaccgctaagaaggttaagaacgatgtcaatgtgaataaagctacggtgaggctcgtagctgacgatcttaaccctggtcattatcttgtttccttcgtcttcgatgccttattcgatggcagtttcactatcatattttttggagaagaggaatcaaagtgcacaatcgtccctcatttaccagaagctttcccaccaatcaaagtccctttccaaaaaggtgccgggcagaagtttctacaagctccagggacaggaatcgacctaggcttcttttcactggatgatctatcgaaaccatcaccagaagaggtgtacccacttgtaatatcagccgagacagtaatatcaccaagctcggtttcagaggaaccattagttcataagcagatcactcaagcggttttggagaagactaatgatggatctttcaaagtgaaagtcatgaaacagattctatggattgaaggagaacgatatgaactacaagagttgtatggaatcgataattcaatcacacaaggtactgctgcatcggggttagaggatactggtggcaaagaatgtgtcatttgcttgactgaacctaaggacacagccgtcatgccttgtagacatttgtgtttgtgcagtgattgcgcagaagaactgaggtttcagacaaacaaatgtcccatttgtagacaacctatccatgagcttgtaaagattaaagtggaaagtagtgatgaacaacactga

SEQ ID NO: 2676 - DNA, 1224 bp, Arabidopsis thaliana
  Clone ID: AT_MJJ3.C1.o23.tg
atgtcttcttcttccttgatacttctcttctctactctctctctctttctcaatgtctcactcgcagacaatcacacggcggttgttataacaacctcagatactccaccgccacttcctccgccttctccaccgccacggcataacttcacttcctctctcatgcccggaatcgcagtcgttatcgccgtcctcactgcgtttttctctctcactttcttacttctcctctacgtcaaacactgtaaacgacgaaacggcagcgtttacgtaaaccacccgcagcgtttcgcaatcactagatacggaggaggatattacaacggtggaggagtagtaggaggaaggaaaaactccggtatagaccggtccgtgattgaatctttaccggttttccggtttggtgcattaagcggtcacaaggatggtttagagtgcgccgtgtgtctcgctcggttcgaaccgacggaagttctgaggttattgccgaaatgtaaacacgccttccacgtggaatgtgttgacacgtggcttgacgctcactccacttgcccgctttgccgttaccgggtcgacccggaagatatactcttgatcggtgattgtaactcctggttcgagctccagttctctaaagatgaatcaaacagtgttaataataatcctcccggtttaacccggtttattccggttagtcgaatttccggtcgtcattcctcggctggtgaacgagcgagtcgactcaacgagattagaacatcttcgtcgtataaatcgaatccgatgtcgtttcggagatcactcgatagctctctgaaagttaacgacgccggcgaggagaaatcggaatctgtcgccgttaattgcttggatcgtctacagagaaaagacggattgttgttgattccgaatcgggagagctttgaggggagatttgagcaccggataattatctccggcgggaatcgagacgatcagaggtggagcgaagtaaggccgtcggatcttttgtatttacgatcagagatgatactcagcgattgccggaaattagctgcggcggagggtggcagagatgtaattaacgggagaagtgtgtcggagttaacgggaattgagagacggaggagatggggaggagagccgagacaacgacaagccacggcggtgatttcgaggtggctcgcttggtcccaccgtgcctccgcttccagcattgtttaa

SEQ ID NO: 2677 - DNA, 987 bp, Arabidopsis thaliana
  Clone ID: AT_MPN9.C1.o19.tg
atgtcttccggcgtaaattcaactggctccgccgcagcagcaccggaggttgacaagatgttcttctgctaccagtgcaatcaaacagtcacaatctcaatttcctcatccgctgatcctttttgtccaatttgtaaccaagggtttcttgaagaatacgaagaccctaaccctaatcaatccctcaatttcaaccctaactcttctgattcctttttccccatggccgatcctttctccaccttgctcccgctcatattcggctcttccgctgccgctccttccggcatggacttcatgagcttattcggtccttcgatgcaaccacaggctcgttccactcagcagaatcctcagtctgacgcgtttgatccgtttacgtttcttcagaatcatctccagactttgcgatctagcggtacgcactttgagttcgtgatcgagaatcatccttcggatccaggtaatcgtatgcctgggaatttcggtgattacttctttggtccaggtcttgagcagttgattcagcaactagctgagaatgatcctaatcgttacggaactcctcctgcttccaaatccgccattgatgctcttcctactgttaaggtaacgaaggatatgttgaaatcggagatgaaccaatgcgcggtgtgtatggatgagtttgaggatggtagcgatgttaagcagatgccttgtaagcacgtctttcatcaggactgtttgctcccttggctggagttgcataattcgtgtcctgtttgtcgattcgagttgcctacggatgatcctgattatgagaacaggagtcaaggaagtcaggggagtggtgatggacaaggatcggttgagggtcagcagacgccgaggtttagtatacaacttccttggccgttcaggagacaagatggctctggttcaggctcgggagcacctggtactggtggaggtaatcttgagaccaggggtgaagatttggattga

SEQ ID NO: 2678 - DNA, 531 bp, Arabidopsis thaliana
  Clone ID: AT_F17I23.C1.o290.tg
atgtcgataacgattccctacgatggctcaatctcccgcgagccatcaccgtctccaccgccgccaaaagcgaacacgaagaatctaccgacgaagattctctctaacttcctcataggtctaatcatgatccctgtagctataaccgcttttatctttatcctcacgtctctcggtttcaccttcttcttcgctttctactggtttcttcaacgaaactatcgccaccgtctccgccgccatcgccgtcacgaatactcagatgggttatctccaagatgcgtgaagaggcttcctcaattcaagtattgtgagcctagttcagagtacggaggcgatgattgtgttgtttgtatcgatggatttagacaaggacagtggtgtcggaagctgcctcgatgtggacatgtgtttcaccgaaagtgtgtggacttgtggttgattaaagtctcgacttgtccgatttgtagggatagggtttatagatttgaagaaggaagaagatggagaccacaaggtgaaattttttga

SEQ ID NO: 2679 - DNA, 819 bp, Arabidopsis thaliana
  Clone ID: AT_T14C9.C1.o100.tg
atgggagacgtatatttcaaccatttcgctcagcaactgcagatgtctgaccaagagaagggtgaaatgtcaagacattcacaccctcattcaatcaatgaagaatctgagtcgtcaactctggaaagggtagcagcagagtcattaacaaacaaagtccttgatagaggactaatggagtatggatgtccacattacagaagaaggtgttgcattagagctccttgctgtaatgagatctttggttgccatcactgtcattatgaggcgaagcagaacaacataaatgtagatcagaagcagaggcatgatattcctcgccaccaagttgaacaggttatttgtttactttgtggtactgaacaagaggtgggccaaatttgtatccactgtggagtgtgcatggggaagtacttctgtaaagtctgcaagctctacgatgatgataacggtcacccttgtgtcgaaggagcaatgcatcacgactgccccatttgctttgagtttctgtttgaatcacggaacgatgtgacggttttaccatgtggacacacaattcatcagaagtgcttggaggaaatgagagatcattaccaatatgcgtgcccactttgctcaaaatctgtatgcgacatgtcaaaagtgtgggagaagtttgacatggagattgcggctacaccaatgccagaaccataccagaacagaatggttcagattctctgcaacgactgtgggaagaaagcagaggtacagtaccatgtggtggctcagaaatgcccaaactgcaaatcatacaacactcgccaaaccagaggctga

SEQ ID NO: 2680 - DNA, 738 bp, Arabidopsis thaliana
  Clone ID: AT_F13I12.C1.o210.tg
atggcaaaagtttcgtttaaggattctctgaaagctcttgaagctgatattcaacacgctaacactgtagctttagattatcctcgggagaaggatggagcgcgtgttcaaatgaggctatcgtacactccagctgctcagtttttactttttcttgtacaatggactgattgccatcttgctggtacactcggtctgctcagagttctgatttacatgacctatgcggatgggaaaaccacaatgtcggtttatgagagaaaaacaagtattaaagatttctatgctgtgatatttccgtcgttgttacaactagaaagaggtatcacagacctggatgatcgtaaacagaaagaagtctgcaaaatacggtacagaaataaagatgagactgaaaaggtcaagctctcggagattgacatcgagagagaagaagaatgcgggatttgtatggagatgaacaacatggtggttctccctaattgtacgcattctttatgcatcaagtgttaccgcgattggcacgggaggtcagaatcatgccctttttgccgagacagtcttaagagagtaaactcaggggacttatggatgttaatggagaaatccgatacggttaatatgtatacaattgagcgggagaataagaagaggttgtttgtgtatatagagaagctacctctagtggttccagatcaagtgtttgcttcttctccttatgattgccatgtcaagtaa

SEQ ID NO: 2681 - DNA, 2001 bp, Arabidopsis thaliana
  Clone ID: AT_F28A23.C1.o200.tg
atgcaaggtccacgaagcactggtgattcatcgactggaataaattatgcagatggagaacccatctgtagcaccaattcagagactacttccaataacatcctgaatccagtggatgttcagtttccaaacaatactacaggttcaggacgaccaacttacgcaagctctagctcgcatgttgttcaaaatcataactggtggagttttggtgaatccagctctagattggggccttctgatcatttaaattccaatggttcaaagactgatcgacagcttctctcagatggctatggatttgaggaagggcaatcaggtatgttgttacctggagagtcctttttgcgtgggtcaagctctagtcatatgttaagtcatgtaaatctgggcaaggacatggacattggtagtggtctgcagacttctggggtcgttatccgccataataactgcgagacttcattgggaagctcaagtcaaaccgcagaggagagaagcagtggtccaggttcttcgttgggtggtctaggttcatcctgcaaaagaaaggctcttgaaggagctcctagccattctttccctggtgaaagtcatggttgcttttttcaaactgagaatggtgcttggaatgagggtcttgctcaatatgatgcttcaagtagcttaagtttgtctatgccctcacaaaattctccaaatgttaataatcagtctggtctaccagaaccaagatttggattgggtggtgggagagcagttacagcaagtgcttttccttctacaagaagcacggaaaccatctctagacctggcaggcggttaaatcctgggcagccaccagagtcagttgcattcagcttcacacagtccggtagttctgtgcgtcagcaacagcagttaccagcaacttctccttttgttgaccctctggatgcaagagcaataccagttacaggtagctcaagcagtggtgatggtcagccaagtatgatccaccttcctgcattgacaagaaatatacaccaatttgcttggagtgcttcgtctagttcgagagcaaacagtatgcctgaagagggattgtcaccatgggacgcgccaagaataaactcagagcagccagtctttactacacctgcaaatgaaacgagaaatccagtgcaggatcagttttgttggagtttcactcgtggaaaccctagtacatctggagattctccctttgttcctcgagcaggatcgagttcagggatccatggtttgcagccgaatcccacttgggttactccccataatcaatcaagaatatcagaagttgctccgtggtctttatttcctagtatcgaatctgaatctgctactcatggtgcttctcttccattactacccacagggccttctgtttcctcgaatgaagctgcagcgccgtctggatctagtagtcgtagtcatcgctctcgacaaagaagatcgggattattactggaaaggcaaaatgatcatctccatttgcgtcacttaggaagaagcttagctgctgataatgatggaaggaaccggctgatttccgagatacggcaggtgttgagtgccatgcgaagaggggagaatttacggtttgaggattatatggtattcgatccactgatctaccaaggtatggccgagatgcatgataggcatcgggatatgcgtcttgatgttgataacatgtcatatgaggagctattggcacttggggaacgcataggagatgtgagcactggtctaagcgaagaggtgatcctgaaagtaatgaaacagcacaaacatacatcatccgctgctggctctcaccaggacatggagccttgctgtgtctgtcaggaagagtatgcagaaggagatgatcttggaacactgggatgtggtcatgaatttcacactgcctgcgtcaagcaatggctgatgctcaagaatctctgcccaatttgtaagactgtggctttatcgacataa

SEQ ID NO: 2682 - DNA, 1839 bp, Arabidopsis thaliana
  Clone ID: AT_F13M7.C1.o19.tg
atggagaattctgatattgacatggtaatcatacctgatactccagatagatcggtacaccatagagaggttaagagaaggccacattctccagtagcaccattaagatatcaaagagaggaataccgtaatcatcatcttcacggaagagccagaccagtccctgaaattggggacaaccgggaaagttctgatacacgaactgagagtggacatcgccctcgtgcttctgtaggcaatgctttgtttaggagaactgttgttgagaaggataaagggaaatccatctccactgatccatgtgcgcctcgtgtagagaaaaatccggttttaaatctgaatcagcgtaacggacatgttcatgttgctgcatcgagataccaaccatctgaagatataagagagttgcgcacaagtaatggttgttctcctttacgaggtgatcataactcctttgtgctgccggggaacagtaataaaggtaaagaaaaagcagattctggctctgttcctcatagagaaacaattgacctttctagtggcaaaccacagaacagaggcactaaaagattggtgagacatggctgcatttctccacatgaaatagcagctagagctagacaagctgctgataccaattcctatgacacacttagtgttgaacaggaactagcttctgaaactgcatcttcgattggcataagagagattgttcctgaaagtgatattcacggaagagctagaggcaaaagacctgaaatttctagtagcagagtttctattctttgtattaatgcaaatagggtggcgagtagagatggcttggagggacttgatgtgcgtgaaaccggtgtagttgaaagagaaagtagacaacagcgacggcggaaaaatggatttactacttcaacggcttcaaatgagccagaagttactgttaatagatcttctggggaaccatctagttcaaggccaccaagaatccagaatcatctaagacactggcatggcacacaagtgttggaaattgaagattcatctcctgaagtaagggtcttccggggtcccagacgtgttgaaaatgatgtatctgatgtgaatataagacaaatagaagcagatgagatactggcccgtgaattacaagaacagctgtaccgagaagagtcgttgatcagacacgagcagatcgatgaaatcatagccaggtcgatggaacaagaagagaattctctccgggcttcttctagtcgtgcttctactcgtattacccgaagctctaataccatcgcagcaaatccacgtgggagaagtcgcctggaagcacgactgcaacaacattcttcaaggaggcgattcaatcctccacaggctcgtgctcctgttagagcaccagcacggggtcgaggttatcgtttaggcggtgcatctgcttcactacgtacagctctgaatttcagttttccaattgatatgggcttagactcgagaatggatattctggaggaattagagaatgctattggacactccattaccagtagtaatcttcttcatatggatcgtgactttactgaagatgattacgaattgctgctagctcttgatgaaaacaaccatcgacatggcggtgcttctgctaatcgcattaacaacttgccagagtctacagttcaaactgataattttcaagaaacttgtgttatctgtctggaaactccgaagattggagacaccatacgtcatcttccttgtttgcacaaattccacaaggattgcattgatccatggctaggacggagtaaatcatgtccggtttgcaaatcctcagttacttga

SEQ ID NO: 2683 - DNA, 1761 bp, Arabidopsis thaliana
  Clone ID: AT_F6F3.C1.o27.tg
atgtcagattctggtgagcctaaaccttctcagcaagaagaacctctacctcaacctgctgcccaagaaactcagtctcaacaagtttgcactttcttcaagaagccaacgaaaagtaaaaacataagaaaaagaaccattgacgctgatgaagaagacggagattcgaaaagcgaaagctctattctacaaaatctaaagaaagttgcaaaacccgatagcaagttatacttttcttctggaccatctaagagttctactacaacgagtggagctcctgagaggtccgtctttcactacgattcatccaaggaaatccaggttcagaacgacagtggagcaacagcaacccttgaaactgagaccgacttcaatcaagacgcacgagctatccgtgagagagttcttaaaaaagcagacgaagcattgaaagggaataagaaaaaggcttctgatgagaagctgtacaaaggaattcatggatatacagatcacaaagctgggtttagaagagaacaaacaatctcgagcgagaaagctggaggctcacacgggccattaagagcttctgctcacataagagtgtcggctagattcgattaccagccagacatttgcaaggattacaaagaaaccggatactgtggatatggagattcgtgtaagttcttgcatgaccgtggggattacaaaccaggatggcagatagagaaagagtgggaagaagcagagaaagttaggaagagaaataaagctatgggagttgaggatgaagatgatgaggctgacaaggatagcgacgaagacgaaaatgcattgccctttgcttgcttcatttgcagggagccttttgttgatccagttgtcaccaaatgcaagcattacttctgtgagcattgtgctttaaagcatcacacgaagaacaagaagtgctttgtgtgtaaccaaccaacaatggggattttcaatgcagcacatgagatcaagaagagaatggctgaagaacggagtaaagctgaacaaggattgcgaaggctgtggcctgtgggtgaggtcgtgccaaagtctaaggctgtaacacgcgtctggtgggacatcaacaggtgtccggttccggctgacgttgatgttcgcagggtcggtccgtgtataaaacgggctttggagaaattaggctactctggtcctctcaccatcactgccgttgggatactaacagacgtccctcatgacttcctcagacaagtccattcctctggaatcgctcttcatcacgttcccaccgtttccgaaacagctctctcagggattgggtgggctgtggttaagtggacctggtataatcaacctccggctaatttaatgctcatatcgtacgagcatatctacttgaccactcttgacatgctaggtaggatcggatacaacactgttcggtctattcttccagatgatcctcaacaagccgcatcctccgcctccccttctacagggtctttcctctgggaaagcttactggcaagcttaccagcagcagatgatatggattcaggggcacctcaggaggacaagtgcggcgagatgggtgaacctgccttgctttgtgagcaatgcagatttactgtccaaggctttgaaaacttctccacgcatctcaagagtgaagaacatgcacatgaatctcaatactaccgtaacgaagatgatgaaaccgatggagacgactacgtacgagactctgaagacgacgaagaagagtag

SEQ ID NO: 2684 - DNA, 1146 bp, Arabidopsis thaliana
  Clone ID: AT_F19P19.C1.o21.tg
atggatctaacagaccgtcgtaacccttttaacaatcttgtttttccgccgccgcctccgccgccatccacgaccttcacaagccctatattcccacgaacaagctcttccggcaccaatttccccattctggccatcgcagtgattggaatcttagccactgcgttcttacttgtaagttactacatcttcgtgatcaaatgctgtcttaattggcaccaaatcgacatctttcgccgccgcagacgaagcagtgaccaaaaccctctaatgatttactctcctcatgaggtaaacagaggactagacgaatccgccattagagctatcccagtcttcaaattcaagaagagagacgttgttgcaggagaagaagatcagagtaagaactctcaagaatgctctgtttgtttaaacgagtttcaagaagacgagaagctaaggattattcctaactgctgccacgtgtttcacattgattgcattgatatctggcttcagggcaacgcaaattgtcccttgtgcagaaccagcgtttcttgcgaagcaagtttcactcttgacctaatctctgcaccgagctctcctcgggagaatagccctcattctcggaacaggaatctcgaacccggcctggttctaggaggcgatgatgacttcgtcgtcatagagcttggggccagtaatggtaacaacagagaaagcgtgagaaacatagacttccttacggagcaagaaagggttacctcgaatgaggtctcgaccggaaacagcccgaaatcggtgagtcctttgcctataaagtttggtaatcggggaatgtataagaaagaaaggaaatttcacaaagtgacgagtatgggagacgaatgtatcgatactagaggcaaagatggtcattttggtgaaattcagcccataagaagatcgatctcgatggattcatcagtggatcgtcagctgtacttggcggtccaagaggaaatcagccggagaaacaggcagattccggtagctggagacggtgaagatagtagcagtagtggtggtggtaatagcagagtcatgaagagatgtttcttctcttttggaagtagtagaacttcaaaaagttcttcaatattacctgtttatttggaaccctaa

SEQ ID NO: 2685 - DNA, 492 bp, Arabidopsis thaliana
  Clone ID: AT_MJC20.C1.o31.tg
atgcactacacacgcatctcgccggctttagtaccatctctatcaccaaccgccgcggctgaatctagcggtggtgggacgatgatagctactgttttcatggcccttctcctcccctgcgtcggcatgtgcatcgtcttcctaatctatctattcctcttgtggtgctccacacggcgtcgtatcgaacgccttcgatttgctgaaccggttaaaccggtcacaggtaaaggcctttcggtgttggagctcgagaaaatccctaaactcaccggaagagagctagccgtaatagctagatcaacggaatgtgctgtttgccttgaagatatagagagtggtcaatcgactcgtctagttcccggttgcaaccatgggtttcaccaattatgtgctgatacgtggctatctaaccacacggtttgtccagtttgccgcgccgagctggctccgaacctacctcaatgtaatgaaaatcaaagtccatgttag

SEQ ID NO: 2686 - DNA, 1482 bp, Arabidopsis thaliana
  Clone ID: AT_T7H20.C1.o30.tg
atggaatcacaaggaccttctaatggtcatcccatggatatcagcagcaattcaatcccatcgtctgcctgtaatctgtgcggaagagtcgttcaatctgcttccgatgatcttgaaatcttcagcttatgtgtcgactgtaagtttttgttgcttgaagatttcggcactcccgcgcctcccttggctcggcggcagacaattaggaggaggaggatgaggaggaggagaagaacaactaggcacgacagctctgagtctgtcggtgtcggtgatctttcctcccaacaattcacacacttgataagcattgcaagacaaagcctttcaacggttcaagctagtgaggatctacgtgatgacctgcgaactagctcccataccactccaagcggctcgacaagatggagactcttctcagaatctgaaagtgatgattttgacaactttggcgaaaccgaatcaaacgctagctttagcctctacagatttccccatgctgataacgataccatttcttttagtgcttacggtggagagtctgatgcttccacggacaggcatgccgatatctttgttcaaccagatgacaggagcgacattgactttgacactgatatagacccgatgcgcgctggtcttaaccagtggaactcagacgaagaagacagggaatgggaggaaggagcgggtccttctggggttgcaggaacacgctatagaaactatttggcaagtccaagtgagagctacagctccatgactcggtttgattcacctgagttagagagaagctttcgtcaaagaattatagagaggaggcattcgttatctcgcaacatcttcactggtttggaggatttggacttctccccctatgctgcaaatgttggggattatcttgatgagagaggctttgatgaactgcttgagcaacttgctgagtctgacaattcaagaagaggtgcaccacctgcatctgtctcatgcgtcaggaatcttccaagggttatcattgcagaggagcatgtaatgaagggcctagtttgtgcgatctgcaaggagcttttctccctccgcaatgaaaccacgcagcttccgtgtctacatctataccatgctcattgtatcgtaccttggctgagtgcccgtaactcctgcccactctgccgttatgagctcccgacagatgataaagattacgaggagggaaagcggaatgtgctggatgtgagcgaggatagctcctcctctgatgatggtacagaatcgggggaagaggaatatgtagagagaggtgagagcgagtctggtgtgagcagagtcagcagaggaagatggctgtttctggctgctgcaccagttgtgagtctggtgggcgttgtgttggcaatgtggctaagcagcccacacaggaggggtatagcaatctctcatagccaaagggagaacagaaccagaagatggctgccgtttttctga

SEQ ID NO: 2687 - DNA, 597 bp, Arabidopsis thaliana
  Clone ID: AT_T28I24.C1.o21.tg
atggatactgaatcattcaaactcgatgttcatgttcaggcttggtctcaaggtcggtcattagggttcttaagcaccgtagtaatcagtctacatagagaagtcgaggaatttctcattaaagagaaagatgatagtgtcacgagtctcggttcttaccctgattcttcttgccacgacccactaatctctctgaaactaccatgttttaaaccaaacgacgtctttcaccgtctccaaagccaactccacgatcatgtcatgtccgaacagatatcttctaagattgtcgaagcccaacgacaaagaagtcaaagtttttactcacaacaacaacctttattcatgattgtctctgtcaaattgactcaaaaggtatacagtgttgtcccttgtatttcttctccgtcagcaacagatgtggaccaagaagaagaatcggagacttgtgcaatctgtttggagaatatgtcgagatctgagaattattgccagatgccttattgtaagcattgttatcatgaaggatgtgtcaccaagtgggtgattggtcataataactcttgccctctctgtcgcaaacctgttgacaaatag

SEQ ID NO: 2688 - DNA, 879 bp, Arabidopsis thaliana
  Clone ID: AT_T17F15.C1.o140.tg
atgttttgtgggagagtggttgtcctgtctgtcctatctctgctgctgtatccatttctgtgggcttggactgtaattggtacacaatggtttacaaagtcgaaaacttgtttacctgaagaaggccagaaatggggctttcttatttggttgatgtttagctactgtggcctcctctgcattgctttcatctgtgtcggaaagtggttgacacgaagacaggtacacttattacgtgctcagcagggaattccgatttcagagttcgggattttagttgacatgattagggtacctgactgggcattcgaagccgcaggccaagagatgagaggcataagtcaagatgctgctacatatcatcctggactttacttgactccagcccaggcaagtctggtcatttattctcagcaagctaagcagcgaacagaagctgttgaggcactcattcaagaacttcctaagttcaggttaaaagctgtgccagatgactgcggtgaatgcttaatctgcttagaggagttccatatcggccatgaggttagaggtttaccttgcgcccataatttccatgtggagtgcatagaccagtggctgcgtttaaacgtgaaatgtccccgttgccggtgctcggttttcccagacctcgatctcagtgcattatccaacctccagagctcaggaaccgaacaacattcacaagtaaacacagaaacatcagaagctcggtacataagaagccaacctcagagcgagagctacttcttgagagttcaatccttaattcacccagtccacacagataccgctctggagactgcagagaacggcggggttcctcctgtcttgaccgatctatctccatctcggagatga

SEQ ID NO: 2689 - DNA, 951 bp, Arabidopsis thaliana
  Clone ID: AT_F15O4.C1.o19.tg
atgaactatagttggattacaatcatgtctctgttggtaatttgtaagctggcttcggcgaaagtagtgttgatcgggaaaaacacaattctatcctttgatgatgtcgaggcaactttcactccaattgttagaaactcgggggaatgtggaattttgtacgttgcagagcctcttgaggcatgctcggatataaccaacatggcggaaaaaagatcaaagtataggtcctcttatgtattgatcgtccttggtggctgtagttttgaggaaaaggttagaaaggcgcagaaagctggatacaaagctgcgattgtctataacgatggatatgatgagctcttagtacctagaaattcatctggtgtggatatacatggcttgcttgttacaagagcatcaggggaggtgcttaaagggtacgcggatcaagacgagatgaagctttggctcatcccgggattcgggatttcatcttggtccatcatgggtattacattcatatctttactcgccatgtctgctattctagccacttgtttcgttgtccgtaggcatcaaattagacagagtgtgagggatttaccacatggtggccaaggactttcttgtatgccaagagacttgttgcaaagcatgccgactgaagtatatagcggtgttcttgaagaaagttcaacttcggttacttgtgctatatgtatcgatgattattgcgttggtgaaaaactccgaatcctaccttgcaaacacaaatatcatgcggtgtgtatcgattcttggctcggacgttgtagatccttttgtccggtttgtaaacaaaatccaagaacaggaaatgatgttccaccagcatcagaaacaacacctctgatttctcctagcccgaactctattacttcactacaatcgttttatgatctaccaatagttgtcagagtatatctgtaa

SEQ ID NO: 2690 - DNA, 399 bp, Arabidopsis thaliana
  Clone ID: AT_F23J3.C1.o130.tg
atgtcatacttcaaaagaaacgaaggaacaattgtgtttgcgtttgcgagcatcgggttcatagcgttttatatcattaattactacattcggcgatgcagaaaccgtgccgcagcagccggggacattgaggaagctcgaatgagtccgaggaggccaccgcgaggacttgacgctgaagccatcaagtcgtttccttcattcgtttacacggaagctagaggaattgagccaggaataggcgagctagaatgtgttgtgtgtttgaatgaattcaaagacgatgaaacgctgcgtttggtaccaccttgtgtacatgtgtttcatgctgactgtgtagacatctggctttctcatagctccacatgtcctatctgtcgtgctaaagtagttccttaa

SEQ ID NO: 2691 - DNA, 1440 bp, Arabidopsis thaliana
  Clone ID: AT_T19L18.C1.o19.tg
atgaactcggcaagcgtttccggtgaatcctctctctccgatatgattcagacagttcatttttcctctggaaaccctagaatcggcgagactcgcggtgtcatgcatctaatttccgacaatgctgtttcgtcatcttcttcttcctcctcctcgaatctccctattggaaggaaccctctcgtttgcgttcttggggtgcccaaccacatgacatatgcagatttttgccagttctgcggctccttcattcagcacatactggatatgcgaaccgtcaggaatgatgacattgaaaatagatacagcattttgataaggtttgatagtcaggaatctaccgatacattcttccagcatttcagagggaaacagttcaactctctggacgaagatgtctgtcgcctgctttttgctcttgatgttcagtttaccggttatagtggatccattgaccatacacagccttctgctgctggcccaatagagcaacctacttgcccagtgtgtcttgagagattggaccaagacacaggtggcattctcacaaccatgtgcaatcattccttccattgctcatgtatttctaattggccagattcttcttgcccagtttgtcgatattgccaacagcaacctgaaaattcagtatgttgtgtttgccaaacaacggagaatctctggatgtgtgttatctgtggggttgttggctgcggaaggtacaaggaaggacatgccagaaggcactgggaggagacagagcattgctattcacttgagcttgaaacacaacgtgtttgggattatgctggtgacaattatgttcaccggcttattcaatccaaaactgatggcaagctagtggagttgaattctcatggaagtctgagcaaggatggttgtggaagctgtgaatattctgacagtggaatgactgatgctctcctgaacagcaaagtggacatgatcattagtgagtacaacgaacttctccaggcacaactagagaatcaaaaacaatattttgaaaagttgctacaaaatgtcaaagaggaaacggaacagaaaatctcagaagctgcgagcaaggcaataagccagagactgcagaagctgcaaaccaggtttgacagatgtgtcaaagagaagcaatttcttgaagatttgaacgaaaatcttgtgaaaaataaggacgtatggagcaccaagattacagaaatgaaagaaagggagaagaaggcagttcgggcaaaggatgaaaagattcagggcttagaagaacagcttggaaacctaatggcccaaatggatggtgagagtgaagtctcagagacgaaagaggtccaggacgccactgtctcgaccaccaatacctcttcttctggggcagggaatgttatacatgcaaataaaaagaagagtaacagaagaaagggttag

SEQ ID NO: 2692 - DNA, 870 bp, Arabidopsis thaliana
  Clone ID: AT_T6K21.C1.o100.tg
atgtcgacaataattccttcacctctggcaccgcaacctccgcaacaacattacgttacaccgcctctcacggtgatcctcaccgtaatcctcctcgttttcttcttcatcggtttcttcactctctatttttgcaagtgtttcctcgacacaatggtgcaagcttggcgtctccaccacggcggagacaccgtatccgacaatcccctccagcaaccggaagctccaccggtaaatcccggccttgaacttcgaatcattaactcatttcccacttttccttactcctccgttaaagatctccgggaagagaaatacggcctcgaatgcgccatttgtcttctcgaattcgacggagatcacgtgctacgtctcttgacaacatgctaccacgtgttccaccaagaatgcatcgatctctggttcgaatctcacagaacttgccctgtttgtcgtcgggatcttgatcctcctccgccaccggaaaacaccaagcctactgtcgatgagatgatcatagatgtgattcaagaaacaagcgacgacgaagaagacgatcatcatcgtcagcagacaacaacacagattgatacttggccatcttcaggacagaccagtagcatcaaaaaggaacaaaacttgccggagaaattctctagatcgcattctacgggacactcgatagtgagaaataaaccggaggaagaagataagtatacattgagattaccagaacatgtaaagattaaggtcacgagaggacatagccagacagagagttgtgttacgttcgctgaacttattagaaacagaggatatgatcatcgccggtttggtgaagtctctggtcaaacgcaatctaaaaattga

SEQ ID NO: 2693 - DNA, 693 bp, Arabidopsis thaliana
  Clone ID: AT_K19P17.C1.o8.tg
atggaagctactcctgtattcaactaccatattgatgtcaatcctgaacgcaaaaagattggcacaatccaagtctatgtaagtttcgtcggatcagccaacatgtcgccgatactaacccggtctaacttctcatgttcattacctgccaatgaattaactgacgacgaagattctccccacaaacaaagactctattacttcttaacagattcagcagttgattcacaagatgcttacacgttaatactaaaactcactcaacttgcacgtgatttaacttctaattcgtttgaatactgtccacgttatgctttgtcagtgtggttgactcttgatgtggctcctttgaatgaatatgagaggaatagcgagtatagacccgcgagcaatttaagggtcggagccttgagcaggagaatatacaagaggaaacaaaagaccagctctattgctaacaagagcacaagatacatgagaaaacgagagacctattctagtggtgagtacaaatgcgcaatttgttttcaggagtttaaaaccggacgagaagttgctactttactttgtggtcatgaatttgacaataagtgtattatggaatggtttaaggttcgctacaattgtccattgtgtcgcttcgaattaccacgtgaagatgatcatattcctcaaagaactacagatttataa

SEQ ID NO: 2694 - DNA, 486 bp, Arabidopsis thaliana
  Clone ID: AT_MYC6.C1.o13.tg
atgatagaatctatgccctcgctggatgtgtcttcaatagtcgttacaggggccattttaatagtcttgttcaccttatatatcatctctgactcttgcaacaagtatattcaacctcctacggaactagctcttgagacacatcaaaactctcatccctcacttcctcctctgcctgtgcctctgcctctgcctctgcctcagcctcagcctcagcctcagcaagacaatgaaaccggacatctaatgccgcttcattctcaactagaatttaaaatcggttatagggcatcgatcgaggaaatggagtttaaagatattgaaaaagaaggatttgatgagattggttgttcaatttgtcttgaagagttagaagatggccatgagattatccgtataaagaagtgtagacatgttttccatcgttcttgtattgattcttggctgaaacagaatcgaagctgcccaaattgtcgatgtttttga

SEQ ID NO: 2695 - DNA, 438 bp, Arabidopsis thaliana
  Clone ID: AT_T22E19.C1.o19.tg
atgcctagtgtacaaatcggtccaccaccagcctcgcaatccgccatcgaggctgtaaggacggtgataatcacggatgaagatttggtgaaagagaaggtttgtgcgatatgcaaggaggaatttgaagttggagaggaaggaaaagaattgaaatgcttgcatttgtaccattcaagctgcattgtgtcttggttgaacattcacaacacttgtcccatttgtcgttttgaggttaacttaggtgtttccgagagtaacgtagacgaaggagggtcttacaacatcgacaatgatcgatcaaatcggtttcggactcgggtttgttctttgtggcctctccgaatgatgattgattgggtacataatctcataggtaagattccacctcccgatatagctttcatggcttttctattatgcttatacgggttttga

SEQ ID NO: 2696 - DNA, 378 bp, Arabidopsis thaliana
  Clone ID: AT_T7N9.C1.o7.tg
atgacatcccctccttctcccttcgctatttcccctgcagccgccgtagcagcagatttgcctaatgaccctgacctgaccatcgttggtttcttgaagtttaggcagaaaacaaaacccttgaagaaggagattttgaagtctctcccgaaattaacattctcgcaggaatgtggtgtgaggttatgtaatagtagatgtgtgatatgtcttgaggattacatggttagtgacattgtgagagtgttgccacattgtggacatcagttccacgctttttgcattgacaagtggtttcagttatgctccacttgcccgtcatgtcgcggcatcccagttatttatcaccctcttttaaatgtattgatccagaaatag

SEQ ID NO: 2697 - DNA, 204 bp, Arabidopsis thaliana
  Clone ID: AT_F14P3.C1.o6.tg
atggccgactctgaaaacatgtatatattgtctgaagacgaagatgtctgcccaacttgtcttgaagaatatacatcagagaacccaaagattgtgacaaaatgttcacaccatttccaccttagttgcatttatgagtggatggagagaagtgaaaactgtccagtctgcggaaaggtgatggaattcaacgaaacaccgtga

SEQ ID NO: 2698 - DNA, 933 bp, Arabidopsis thaliana
  Clone ID: AT_T18A20.C1.o16.tg
atggacgaagaatctgtttctaatggttctcttttcagcaaattcgaaggagaagagacgatgggaaaagttcttctattctcaatcgtatcgattttcacagggattctattcctcctcttgcttcatctctacgcaagactcttttggtggcgtgtggaacaacatttcaacctaaacctaatccaatccgacgatcctggctccacagtcatcggacgtaatcctcgacgacgtcgttttgtcttcgctcaaagtcaagaagatcctcttcacaacgctggacttgattctaaaattctccaatctatccatgttgttgttttcaagtgtacggacttcaaagacgggttagaatgcgccgtttgtctctctgatctcgttgatggcgacaaagctagggttttgccaaggtgtaatcatgggtttcatgtggattgtatcgatatgtggtttcagtctcattccacttgtcctctctgtagaaacaccgttggttccgtggaagatacgacacatggaggaagtgagggtttacctcaaaatcaaaactttgaatcagggcactcgactaatcagcataatccatctcaagatcagagctttgttcatgagttttcgacagaacctctgagttttccgacaaatgtactggtttggggagatcagaatcaagttagaagtgcaggcctcgttgttactgaagaatctccttctggaaattttgcagcttcgtataacgatcatcaacaagaatctagtagtaccagatcacaagaagtgacggcggttgtggtggacattccggataattcaagtgagaatttatccgagagaatcgacgaagaagaacctaagtcaccgatgttcacaaggttaagattgcttaagaatgttttgagtagagagaagaccaacaacaacaatgtttga

SEQ ID NO: 2699 - DNA, 948 bp, Arabidopsis thaliana
  Clone ID: AT_MRP15.C1.o6.tg
atggaagatgcatcagagactagctactggtgtcacatgtgctcccgatcggtgattccattgattcaagacgaaatcatcaaatgcaatttctgtcaaagtggttttgttgaagaaatggataataatgatgaccatcaggctgctgattctctctggactcctatcttgatggagatgatgaacaacaatcacgaccaacattctaccaatcaggaagactcagaatctattcttgaagatgaagacgaagacgaagatgatggtgatgatggtgatcagaacaatgatggagaaattgatataactcatcaacttgaagagattaggaggataaggactagacattcaactgctattgttaatctgcttcaggggattcgagctggattattgatcgaatccgagaacaacgaggataatcccgataatagcgagcttgtcgtcttgatcaactcatttaaccaaaggatcagggttcatcaagattctgtagacaccacttctgttccttctggatctttgggtgactatttcattggacctggattcgagacgttgcttcagcgtttggctgagaatgatctgaacaacaggtatgggacacctccagctacaaaagaagcggttgaggcattggcgatggtgaaaatcgaagatagtttgttgcagtgtagtgtgtgtttggatgattttgagattggaatggaggctaaagagatgccgtgtaagcataagtttcatagtgactgcttgttgccatggcttgagcttcatagctcatgccctgtttgcagatatctgcttcctacaggagatgatgatgagccaaagactgatgcagaaacatcgagaaacgatgataacaatgaagatatcagtaatgcttctatggctagtaatggatcatcaccagactcaagttcgaacaattcatcggttaactaa

SEQ ID NO: 2700 - DNA, 2052 bp, Arabidopsis thaliana
  Clone ID: AT_T9I22.C1.o12.tg
atgttaaacggctggagaagagctttttgcacttccattcccaaagaaactaaccaaaacgacgtcgacgacgacggactcgttggtctccgccacaaatcaacctctcgattcggctttttctcaactccttctacgcctcgttctgattccggcaccggaacttacagcctccgttgcaggacttcaacagccaccgccgtctccactacttcatctcttcccggaactccaaagcttaagtgcaaaaccaccaccaccggagaaacaactcccagaaacagaagccttgtctctcttttaacaccttcttcttcttctatttctccggcgagcttcactctcctcaaatccaaactccgattcaagcagagtagcagtaacaaatgtggaatctgtttacagagtgtgaaatcaggtcaaggtacggcgattttcacggcggagtgttctcacacgtttcattttccttgcgtaacctcacgcgccgccgcgaatcataaccgtcttgcttcttgtccggtttgcggatcctcgcttttgcctgagattcgaaattacgctaaaccggaatctcaaatcaaaccggaaattaaaaacaagtcgttgagagtttacaacgatgacgaagctttgatttcatctccgatatctcccgccggatttcacacaatacttgaatcagatgagaacgaagactgcgaggagtttacaggattttccgttaatactccgtcacctttaacggcgaaattgttaacggatcgaaacgtggacgttaagctctctccggaatcggctatcgttgcgtcgggtaaaggctacgagacttactccgtcgtcatgaaggtgaaatcgccaccgtttccgacggcgcgtggatttgcgcgtagagtgccggtggatttggttgctgttttagacgtaagcgggagaaattccggtgggaaattggagatgttgaaacaaacgatgaggattgtgctttcgaatctccgggagatggatcgtttatcgattattgcgttttcgtccagctcgaaacggttatcgccgttacggaggatgacggcgaacgggaggagatcggcgcgaagaatcgtagatatcatcaccgttcctggttctgtctccggcgtcggaattgatttctccggtgaagggatgagtgtgaacgacgcgttgaagaaagcggttaaggtgttagacgatcgccggcagaaaaaccctttcaccgccgtgttcgttttaacggaccgtcaagcccatcaagtggcccaattagcccattcgagaatccctatacacaccatatggcttagccacgcgattcccgaagacgcgtttgcgaggaccatcaacggttatttgagtttgtcggttcaggatctcggtttacagctcgggatagtttccgggttgggtcaaggagagataacttctgtttactctctttccggtcgacccgcttggcttggaaccggttcaatccggttaggtgatatgtatgcggaggaagaaagagcgttgctggttgaaatcaaatcaccggttaacaattccttaaccggtagtagatctcacaaaatcatgaccgttagatctcgttacgtggatccaacaactcaggaattaagaaaccccgaagatcgcgcgcttttaatacctactcctctaactgtccgatcatcatcaaatcccaacatctcacggctcagaaacctccacgtcagcactcgagccgtcgcggagtctcggcggctaatagagcgtaaccattactccggagctcatagattgctgacgtcagctagagcattgcttgtgcagcacggtttgagctcgagcgatgcgtgtatacgtggactggacgcagagatagctgatcttaatagtgtgaaaggaagacacgtggcggcatcagagagtttggagtcgcttactccgacgtcggcttggaaagcggcggagaggttggctaaagtggcgatggtgaggaaacatatgaacagagtcagtgacttgcatggtttcgaaaacgctagattttag

SEQ ID NO: 2701 - DNA, 1035 bp, Arabidopsis thaliana
  Clone ID: AT_M3E9.C1.o170.tg
atggtgaatccagttattggtgccgagatcaaatgccccttttgccaaagcgggtttgtcgaggaaatgagccgtgagattaatggcggcagcagtagcagtctaagggaggttcaagaccctgagattgattttggtacagaccgtgcattgtctctatggggtccaatcttgcttggaatgatgagtaatcctcgtagacgtagaaggtttaggaggacagagtttggtgtggataatgatgaggtcaatgtatctgatgatgttgatggaaatgacagcgtcgatattgatcgacatcatcatcgtcgtcatcgccacaggcaacaaggtagagagattgatttagacagagagtttgagtctatccttaggaggagacggagaagctcagctactatattgcagttgcttcagggtattcgtgcagggattgcttctgagtatgagagctcggatcgagacctgttaaatcaatcagctgttgttcagggttcaacgagtttgaatcaaaaccggaacaatacttctctttctgcaattggagattactttgttggatccagtttagaccatttgcttgaacatctagctgataatgattcaatcaggcacgggagtcttccagcacgtaaagaagttgtggataatctcccaacggttaagataagtgaatcattgcagtgctcgatttgtttggatgattttgacaaaggaagtgaagctaaagagatgccgtgtaagcacaagtttcacatccggtgtatagtaccgtggctcgagcttcacagttcatgtcccgtgtgccgatatgaactccctcctgatgatgagaccaaggttaatcctgtaagaccgagaacaagaactctagagatcaacgtaagtaatgagaatgtggaagatgatgcaaggaacagtaatgtgagcgagagaaggttctcttttccatggccgttcagcggattattctcttcatcctcttcgtcatccgcatcggcctcggggtcatctcatctcggtgagaactcgtaa

SEQ ID NO: 2702 - DNA, 2742 bp, Arabidopsis thaliana
  Clone ID: AT_K1G2.C1.o3.tg
atgaaagttcgtaggaaacttggtggtggttgcggcggagacgtcgttgtttcatggcggacgttcttttggttcgtgattctgtttgtcttctccttcgttctcttctccaccatgtttatttttaaggggaagtttcgtccggtggttcgttcgacgataagcttctcaacggctgttacggcaagggcggttttccgtgagtctatatcgtcttctccggcggttacgattcgtgaagcggtgaaattacctgaacaaactctggttttcctaaaataccctcagtctcgtcggttatttacaaaagacgatctcatttgcgttttctccggttcgtcgaagctacggaaagtgtatccgacggctgtggacagagacaaatttggaggtcagatcgtacggtgtcctgagacgccacgtggctacaccatttcgcttgccgtttcgagatggacgaccgatgatcatctcccggctggaccaactcaccggtatgattggctggtttacgacgccgtgatcgactacgataactctacggtggtttttgtcaaggggcttaatctacggccaggaagagttgctgacgtgtcgagatatgagtgcgtgtacggttgggatttcgcgaaacataatcggttaataagatcagatgtcatcactgcggctcaggagatcgtacggtgtagaacaccgttagctgtgttagacggcccaaaagcggcccgtgggcctgttaaagtctcggttagaatcaaaggaggaaccggaatgcttccttctatcgctcagccggttcggatcattaacccgccgcgaaagaaaccctttcaaatgtgcgtttgcaccatgacccgaaacgcagccgcggttttgagagagtgggtgatgtatcacgccggaattggcgttcaacggtggttcatctatgacaacaacagcgacgacgatatcatcgccgagatcgagaatctcgaaagacgtggttacaacatctctagacatttctggccgtggattaaaactcaggaagccggattctctaattgcgcgatccgtgcaaagagcgattgcgattggattgcgtttatcgacgtcgacgagttcttctacatcccatccggtgaaactctaacttccgtcatcagaaattacacaaccaccgactcaatcggtgaaattcgaacaccttgccacagtttcgggccatcgggtttgagatctcggcctcggagtggagtcacgtcgggatacacttgccgtgtggtgttaccggagagacacaagagcataatccggccggaagcgatgaacgcgacgctgataaacgttgttcaccattttcacctcagagatggattcacgtttgctgacatggataaggatataatggtaatcaaccactacaagtatcaggtgtgggaggttttcaaagagaagttttatcggcgagtcgcgacgtacgtagcggattggcaaaacgaagagaatgtcgggtcaagagatcgagcacccggtttaggaacccgacccgttgaaccatctgattgggctgagagattctgtgaggttaatgatacggggcttagagatcaagtgtttgagaagttcaaagacaaaaaaacgcagcgtttagtttgggaaaaagcggaagaagacgacaatatccagagaatggtgagtgaaacaccattgagagttactaatcgatctggagatggatcaaatggatcaaaggaagtatcgatcgcgagagagaagaatggtgaaaacgcagagatattcatcagcccgagattcaaatcagcggcggctatggcgggttgggacgaagaagatctgataatcgctagctttgtggtagatgatactcctgaaagaagttcttcaaagcgaaggagacgttccaatttgttgtttaaatcaaccccaccttctggttcttcaagaaggaatcagcgtgttaagcaaagtcttgttccgttacctgttattgatcttgataaagtaatcagacatgaagaagaaaaatctgcagagaagaagaaaaagaagagagagatggaaacagaaacaaaagaagagaagaaaatagataaagatgagaagagtttgtcagatcatgttgtgcttccttgcatagataagcttcgagatgaattgtcttgcgcgatttgtcttgagatttgctttgaacctagtactacaacttgtggacacagcttctgcaaaaagtgtttgcgatctgcggcggataagtgtggaaggaaatgccctaaatgcaggcaactaataggaaatggaagatattgtactgtcaatacggttctttggaacacaatccagcttttgttccctaaagaagtcgaagcacagagagctgcttctgctaacttgaaaggcaaggagacaccgagtcctagaaatccgaatcaaaggctaagaagcagaaacagggaaactgcattgtttcaagagaggttacaaagagaggatatttcgagattgcttgtatctgaagagagaagtgagaggagcgaaagaaggaggagaagtacaagtatgaggttggatcaaaatagggatgcagcattagcgatgcggttacagcgacaggagttcgcatcagcttttggcgcaacgacggctgaaacttcttcttcatcggtttctactctgtcgcgagcaagagctaacctgcaagctatggcgtcaagagctgttcgcaggcaaggatga

SEQ ID NO: 2703 - DNA, 756 bp, Arabidopsis thaliana
  Clone ID: AT_F21J9.C1.o220.tg
atgtattatcagttgaccaagtcttcttacagagactctttgaagattctggaggctgatattgagcacgccaatggactggctgctgagattccaatgggaaagagcggtgtgcgacttcagatgaaattggtgtgcagcaatttggctccattcttcatattcctgctacaatggatggatttctcatgtctgcttccaagatattttgatttcttccacatactcatatacaaggtacgtgctgatgggcggtggaatcgatctaggtacggaaggaaagctacgattagggagttttacggtgttatattaccatcacttgagcgacttcatatcaactttgctgacttaccggacgaaagcttgtggtatccgaatccaaaagccatcaccaagaagcagtatgacattgaaggtagcagatacatgaatagcattgacttggaaagagaagacgaatgcgggatttgcttagagccttgcaccaaaatggtgttgccaaactgttgtcatgccatgtgcatcaaatgttaccgtaactggaacacaaagtcggagtcatgcccgttttgtcgtggcagcatcaagagagtgaactcagaggatctgtgggtgctaacttgcgatgaagatgtggtggatccagagacggtcaccaaagaggatcttcttcggttctacctccacatcaatagccttcctaaggattatccagaagcggccttcttagtctacaacgagtacttgatatga

SEQ ID NO: 2704 - DNA, 504 bp, Arabidopsis thaliana
  Clone ID: AT_T5C2.C1.o130.tg
atgacattcttcatcgaagacactagtctcatcatcagccacgttctctacaaaacggcacttatcatcaccgttttacgatggatctttgcatggatcctccgttaccgctcaagatcctcctcatcatcatcatctcaatcctcctcttctccttctatttcatcacaaaccatcaaagaaagcctagccgtgtccgctttccgcgacgcggtggagagatctcccgcggcgataaacgacatgtgtgccgtgtgtctaggagatcttgaagacgaggacgaaatcagagagcttaggaactgtactcacgtgtttcatcgtgattgtattgaccgatggctagattatgaatgttgcggcggtgatgatgataaccaccgtacttgtcccctatgtcgaacgccgttgcttccatctttcactgattactcaaccgttactcaaactagttgggctgttgaacgacttctttacctcttcggcgacgatcttcttccctga

SEQ ID NO: 2705 - DNA, 831 bp, Arabidopsis thaliana
  Clone ID: AT_F23N11.C1.o3.tg
atgactcttcttgtatacaagggtgccgcaaaggtctctatagtaatgatcgggcaacaagccatcatggattcttatttatgccttttacatctcacagctgggattttagttgaatccctgtttaacgcttttgcaacagctgcgttcttcaaatttgtagtgttttcgatatttgagatgagatatcttctgtccatatggaaagcgaccaggccttcaaccagcggtgagggctgggaaacaatgaggcgtgagctctcctttttgtacagccgtttctatggaatccttcttggaggcatattattaatgtacgagttccacaactacatgcggccgatcctcctactcatgtactcattttggattccccagatagttgcaaacgttgttcgtgattctcgaaagcctctgcacccatattatatactagggatgactgttacacgacttgctataccgttgtatgtttttggttgcccgaagaacttcatgcgtgtagagcccagcaaggcctggtgtgtaagcctgtgtgcattcatggggtttcaagctggtgttcttcttcttcagcattatttcgggtctcgttgctttgtccctcgaaagttgctacctgagaaatacagctactacagaagactcgatcataatgtaaaccgaagcagggactgcgtaatctgcatgaccacgattgatctcagacaccgtattaatgattgcatggtaacgccgtgtgagcatatattccactcgggatgcttacagagatggatggatataaagatggagtgcccaacatgtcgtcgcccacttcctccagcttaa

SEQ ID NO: 2706 - DNA, 4485 bp, Arabidopsis thaliana
  Clone ID: AT_T13K14.C1.o230.tg
atgtctccattctcagaaacctctgttctgctacttcccatggtcgagaaatgcataaacctcttgcaaacctacggcgtttcatcgataacgaaactcagacaaatccacgctttttcaatccgccatggagtctcaatctcagacgccgagcttgggaaacacctcatcttctaccttgtttctcttccttctccacctcccatgtcttacgctcacaaagtcttctccaagattgagaaacccatcaatgtctttatttggaacacattgatcagaggctacgccgagattggtaattccatctctgctttttctctataccgtgagatgagagtctctggtttggtcgagccagatactcatacttatccgtttcttattaaggctgtgacgacaatggcggatgttagattaggagagacgattcattcggttgttataagaagtggctttggttcgttgatctatgttcagaactctctgcttcatttatacgcaaattgtggagatgtagctagtgcgtacaaggtgtttgataaaatgcctgagaaagatttagtggcttggaactctgtgattaatgggtttgcggaaaacggtaaaccagaagaagctttagcgctttatactgagatgaattccaagggtatcaagcctgatgggttcacaattgttagcttgttgtctgcttgtgcaaagattggtgctttgacattgggtaagagagttcatgtctatatgatcaaagtaggtttgacacgaaacttgcattccagcaatgtgctcttggacttgtatgcgagatgtggaagagtggaagaagccaaaacacttttcgatgaaatggtggacaagaacagtgtctcgtggacttcgttgatagtcggtttagctgttaatggttttgggaaagaagccattgagcttttcaagtatatggaatcaacggagggattgttaccatgtgagatcacgtttgttgggatattatacgcttgtagccattgcgggatggtgaaggaaggttttgagtatttcaggagaatgagagaggagtataagattgaacctaggatcgagcattttggttgtatggtcgatttgttagctagagctggacaagtgaagaaagcatatgaatacatcaagagtatgccgatgcagcctaatgttgtaatctggagaacattgttaggagcttgtactgttcatggtgattcagatttagcagagtttgctagaatccagatcttacaactagaaccaaaccacagcggcgattatgttctcttgtcgaatatgtacgcatccgagcagcgttggtccgatgtgcaaaagatacggaaacaaatgttaagagacggtgtgaaaaaagtccccggtcacagcttagtagaagtaggaaacagagttcatgagtttcttatgggtgataagtctcacccacaaagcgatgctatttacgctaagctgaaagaaatgactggtagattgagatcagaaggttacgttccacaaatttctaatgtctatgtagatgttgaagaggaagagaaggagaatgctgtggtttatcacagtgagaagattgctattgcatttatgttaattagtacaccagaaagatcaccgattacagtcgtgaagaatcttagagtatgtgcagattgtcacttagcaatcaaacttgtgtcaaaggtttataaccgagagattgtagtcagagatcgtagcagatcgaaaatggcggacactagtcacctggagaggatgggaagagaactcaagtgccctatttgcttgagtctatataattctgcagtttcactttcgtgtaaccatgtattttgcaatgcgtgtatagtgaaatctatgaaaatggatgctacttgtcctgtttgtaaaatcccttaccatcgtagagagattcgaggtgctccacatatggatagcttggtgagcatttacaagaacatggaagatgcttctgggattaaattattcgttagccagaataatccgtcaccatcagataaagaaaagcaagtaagagatgcttccgttgaaaaggcaagtgataagaatcgtcagggatctaggaagggccgagcatccaagaggaacgagtatgggaaaaccaaggaaatagatgtagatgcacctgggcctattgttatgaaaccttcatcccaaaccaagaagagggtgcagctgctccagaatctgtctgctgaaagtttaactaaacctactgagtctgttgaaacagctgaaaaacccaaggactacactgaaaacactgtgattcgtttggatgagcatccatctctgaataaagaaggaaatctttcacccttcttttggttgagagatgaagatgatggggagaactcaagtcagcgtacagaaagtgatcaacttttagggactacaccagttaatgttccctctttcagcgatttgatggactcagatcatgagagcccatcgaaggaagacgagcaacaaaagcccaatccaggtgacatgtttgatagcgaaatgtttgaatggactcagaggccttgttctccggagattctacctagtcctgtgaaggccaaggtcctaggtagagatgagattgatcttactcaaaagaagctacctaaagttaaagttgcatcatccaaatgtaaaaaccgcaaagcaggaagtgcaagaaatacagttgctagacgaagcattggggtttcacaagaggacaacatggaatcatctgcagcagcaaccattagtgagcaacaagatagtcgtgggacttctggcacaattatcaggaatgatgtgaatactgatgaaaatgtgaaagctaaaagagctacaagaagcaaggctcagagtacacgagttcagtctgatctaaatgtatccaatgaagctgatgggaagcaggggacaaagaggaaaagatctagcattaaatcctctccagctcacccaatcgcaggacctaatgagctctcacttggaacagaaattgtgggaaagggggatcaggatcaagcccatggtccatctgatacacatcctgaaaaacgaagtcccaccgagaaaccctctctgaagaagaggggaagaaaatccaatgcaagctcctctttaaaagatctatctggaaaaacacaaaagaagacttcagagaagaaattgaaactagattcccatatgatctcaagcaaagctacacaaccgcatggaaatggtattctaactgctgggttgaatcaagggggtgataaacaagattcaagaaacaataggaaatccactgtgggtaaagacgatcataccatgcaagttatagagaaatgctcaacgataaacaagtcttcatctggaggcagtgcacatttgcgacgatgtaatggatctttaacgaagaaattcacatgtgccttttgtcagtgttcagaagacacagaggcttcaggagaaatgactcactactacagaggtgaacctgtctctgcggattttaatggtgggtctaaggtcatacatgttcacaaaaactgtgctgaatgggctccaaatgtatacttcaacgaccttaccatagtgaatcttgatgtggagttgacaagaagccggagaataagttgcagctgctgtgggcttaaaggcgcagcacttggttgttacaataagagttgcaagaatagttttcatgttacgtgtgcaaaactcataccagaatgcagatgggacaatgtaagtgttgcatatattgtagaagctctatatagtcccttacacagttcttttaacacattttcttatcaacaggtaaaatttgtaatgctatgccctttggatgcatccattaagttgccctgtgaagaggctaattcaaaagacaggaaatgcaagcgtactcctaaagaaccactgcactctcagcctaaacaagtatctggaaaagctaacatccgtgagctccatatcaagcagttccatggattttccaagaaattggtcttatcttgctcagggctcacagttgaagagaagactgttattgcagaatttgcggaactgtctggagttacgatctcaaaaaactgggattcaactgttacacatgttattgcatcaatcaatgaaaacggagcctgcaaaaggaccctcaaattcatgatggcaatcttggaggggaaatggatactaaccattgattggattaaggcgtgtatgaaaaatacaaaatatgtaagcgaggagccatatgagatcactatggatgttcatggaatacgagaaggaccttatcttggaagacaaagagctttgaaaaagaagccaaaactttttactggacttaagttttacatcatgggagatttcgagcttgcttacaaaggatatcttcaagatctgattgtagcagcaggaggaacaatcttgcgtaggcggcctgtttcttctgatgataatgaagct

SEQ ID NO: 2707 - DNA, 1296 bp, Arabidopsis thaliana
  Clone ID: AT_T15G18.C1.o20.tg
atgatccgttcttcgattgtaattttatctctgttactaatttcacacttggtttctgcaaaagttctgttgatcggtaacagcacatctctctccttcgacgacgtcgaagccactttcactccgatgattaagagatcggatcaaggcggtgtgttgtatgtagcagagccactcgatgcttgttcggatttggtgaatacggtgaatgtgaaaaatggaactactgtgtctcctccgtatgtgttgattatccgcggtggttgtagtttcgaagataagattaggaatgctcaaaaggctggttataaagctgctattgtttatgactatgaagattttgggttcttagtatcaacaactggggaagtacttaaagagtatgcgggtcgtaccgattttgaagtgtggctcatgccaagtttcgagacttcagcatggtcaatcatggctatttctttcatatctctcctcgccatgtcggctgtgctcgctacttgcttctttgtccgtaggcatcgagttaggcgtcggcgtattctggctcttaatggcaatgactttcatcgtatgcccaaaagcatgataatacgtatgcctactaccatatttaacggtatttgtgatgaagcaactacatctatattgtgctgcatatgccttgagaattatgagaaaggggacaagctaaggatcctaccttgccatcacaaatttcatgttgcttgtgtagacttgtggcttggccagaggaaatccttttgcccggtttgcaaacgcgatgcaagaagcatcagtaccgacaagcccccatcagagcacacaccctttctttctcggactcctagcatgaccccgacgtcatcgtttctcttatcatcatcctccacaaccccattgcagtcatctcatgagctaccaatatccatcagagtagacccttctttaccatccacctcaatgcagccacacacagttcctatgtatctctcccactctcgctcccacacaagcttccaaaatggatcaaaccgattttcccggcctataccagttagccggagttcagcagatctcaggaacgccgtttcccaaagatcttacaactcaccccaccaggtttctttgcctcgtttcctccactcaagatatacgcacatacttggcccgggaaatgcatcaagaagccaggttgttgggttgttaacaagccagcgcgagcattcacttcatcaaaatgactcgcgcaggtctttcattcactttgcatctgcgagctccttaccaggctggtaa

SEQ ID NO: 2708 - DNA, 975 bp, Arabidopsis thaliana
  Clone ID: AT_F17A22.C1.o9.tg
atggccggagctaaagattcgggttgcgatgatgatctccgaattgctggtggatgtgaccctggaaaacgcgggaacccggaggattcctcgtctcctgtcgaagtctcgtgctcgatttgcctcgaatcggtgctcgatgatggtaccagatccaaggctaagctccaatgtggtcaccagttccatttggattgcattggatcagcatttaacatgaaaggagccatgcaatgccctaactgtcgcaatgtcgaaaagggtcagtggttgtatgcaaacggttctactcgcccctttccagagttttccatggaagattggatccctgaagaagacttgtacggtttaagctatccggaaatgcaatatcgggtccattggtgcccgtttggtgaactctctcaagcagcagcttctttcgagcttttgatccttcaaacgcgaaagctagaattgacttttgctctgtgtttcagggaactggaacctgcaaccactacatatcatactgagttccatggacatcacgccgctgctgtgaatcattcgtatcttgcatatgttggacctggcccagccgctaccccgagaactagcgacaataacagcacagatgatcatccctggaacagccactctaacgatcactttcaccagcttcctgttgccccccagtatcatcaccattccccatcgttttcactacccgctgctcatgtggttgatggtgaagttgactcttcagcagcacgaggcctaccttatgcgcatccatttctttttagtcaccgagtgttttacaatattcttttggaattgggcattgtaggtctaatcaaaggtcctcaccagcaattaacagttaccaaggaagcagcacccaaatgcgtgaacagcatcatgcttataatcatcagaggcaacaacatcatgccaatggtcccactctcgcatcacctctcatctccatga

SEQ ID NO: 2709 - DNA, 627 bp, Arabidopsis thaliana
  Clone ID: AT_MNJ8.C1.o60.tg
atggatacatatagtaattgggagtctgtagagattactacaacagcaatgatcctaccacaagatcaagggtttagaaacaccgtgttcgtcaatctacacgatgtggtcaacgagttagctgaagatcaaaacggtgtcgtcatgtgtttgggaacgttcgcggctccacttatgactaaaatcgaattgaaaccatcatgtctcacttcacatcacatctatcaagaccttgacgagttcatcacagatattgagttttgtcgattgttgagcgaaaggatcgctttggattgtgctcatattccccaaccttttagcgtctccttttacgtgagagtcacaagagatgttatgttaccgtctattgctgttccgtcgagagatatgtttcaaagattgcttgaggaacaaacaatggaatttactgatttgggagatgaagaagaaaccacttgttcgatttgtttggaggacttttcggagagtcatgatgataacatcattctgttgcctgattgtttccatctgttccatcaaagttgtatctttgagtggcttaagcgtcagaggtcgtgtcctttgtgtcgaagagtaccgtacgaggaagatcttgaaatagagtga

SEQ ID NO: 2710 - DNA, 876 bp, Arabidopsis thaliana
  Clone ID: AT_MRN17.C1.o15.tg
atggatatgggtttccatgaaaatgagcaaaatcaagaatttgcgaatctaatggagattggatctgggcattacgggtgttcacattatagaagacgatgcaagattagagcaccatgttgtgatgagatttttgattgcagacattgccacaacgaagctaaggattctcttcatattgaacagcatcatagacatgagcttcctcgacatgaagtttcaaaggtcatatgctcgctttgtgagacagaacaagacgttcagcaaaactgctccaattgtggtgtatgtatggggaagtacttctgttcaaaatgcaagttcttcgacgatgatctttccaagaagcaatatcactgtgatgagtgtgggatttgcaggaccggaggagaagaaaactttttccattgcaaaagatgccgatgttgctactccaaaattatggaggacaaacaccaatgtgttgaaggcgctatgcatcacaattgcccggtttgttttgagtatctgtttgattcaacaagagatatcactgtcctacgatgtggtcacactatgcatctagaatgcacgaaagatatggggctacataaccgatacacatgccctgtatgctccaaatccatatgtgacatgtctaatctgtggaagaaacttgatgaagaggttgctgcatacccaatgccaaagatgtatgaaaacaagatggtatggattctctgcaatgactgcggctcaaacacgaacgttcggtttcatttgatcgcgcataaatgcagtagctgtggttcctacaatacaagacagacacagagaggctctgatagtcactcttgctcctctggaatgcctcaggttgttggttcaaccggttaa

SEQ ID NO: 2711 - DNA, 615 bp, Arabidopsis thaliana
  Clone ID: AT_F24O1.C1.o39.tg
atgagtcaactcggagatttgcttagagaatcagaagatggaacaagaagtgagaggacgatgatgatgagtttgctcgaagaagatcaaatcaacggtggagatagaacgatgagcaaatggactacgttaaagcaacggctgagatttgattgggttggttgttgtggtaagcctcttactctgcgtctcagacaagcggagacaccaatcgtcgtcgatgatgatgacgacgaagaagaaagtcaaaaccaggtcgttgacttttcggatccgggtacgggtacggagttggattgtttgacacgtggctcaacgaggaaccttgcagaggctttagcggaggagagattagcgcacgtgacggaggaggagacagcagttactaaagtaccgttgatgaggttgcttgcggaatcggacggttgtgattcgacgacgacgtggttgggtaatgatccgctgtgttgtgtgtgtatgggaagagagaaaggtgcggcttttattccctgtggacatacgtattgtagagtttgttcaagagagatttggatgaatcgtgggacgtgtcctctttgtaaccgttcgatctttgacgttcttgatctttactga

SEQ ID NO: 2712 - DNA, 624 bp, Arabidopsis thaliana
  Clone ID: AT_MNL12.C1.o2.tg
atggaaactgaatctttcaaactcgatgttcatgtaaaagctttgtctcaacctccgtcgttagggttcttaagtacggtagtaatcagtcaatacagagaagtagaggaatttctcattaacaacaaggataattgtgtcacgagtctcggatcttacccggatgattcttctacttgtcacgacccactaatctctctgacactcccaagtttcaaaccaaacgacgtctatcaacatctccagacccaactccacgatcatgacttgtccgagcaaatatcttgtaagattgtcgaagcccaacaacggcaaacaagtcaaagtgtttacttgccacaacaaccacctttattcataatcgtctctgtcaaattgacacacaaggtttacgtcgttgtgcctccgttggcaacagatttggaccaagagatgagccaaggagaagaagaagaatcgaagacttgtgccatctgtttggaggaattgtcgacatccgatgattactgcgagttgcctaactgcactcattgttttcatgaaccatgtctcactcagtggttgatccgaggtaataactcatgccctctctgtcgcaaacctgttgacaaacaaccacagtga

SEQ ID NO: 2713 - DNA, 1146 bp, Arabidopsis thaliana
  Clone ID: AT_F16M19.C1.o7.tg
atgtcaagagagacgacgacggaagcaacgcctttgattttaaccgacggaggaggaggaaggagatcggtgagaagacaagggttaagagaagcggcgaggttactaagacatgcaagtagcgggagaatgatgatgagagagccatcgatgcttgttcgtgaagctgcggctgagcagcttgaagagagacaaagcgattgggcttattcgaaacctgtagtggttttggatttcgtttggaatcttgcttttgtcgttgttgctacagctgttttggtacttagcagcgatgagaatccgaatatgcctcttagggtttggattattgggtatgggttgcaatgtatgatgcatatggtttgtgtttgtgttgagtatcgtaggaggaatagtagaagaagaagagatttgagtccaagatctagctcttcttcttcttcttcttcttcttctatggatgaagaagaaggtttgggtttgagtagaaactcagatgaacgttacttggagctaggtcaattagagaatgaaaacaatagttttgctaagcatctagaatctgcaaatacgatgatctcatttatatggtgggttattggattttattgggtatcttctggtggtcaagagttagcacaaggatccccacagctttattggttgtgtatagtctttcttggtttcgatgtgttctttgttgttttctgcgttgcattggcttgtgttatcggcattgctgtttgctgctgcttgccttgcatcattgcagttctatacgccgtagcagaacaggaaggagcttcgaaagaagacattgaccaacttactaaattcaaattccgaaaggttggtgatactatgaaacacactgttgatgaagaacaaggacaaggagattctggaggagtgatgactgaatgtggtacagattcacccgttgaacatgctcttcctcatgaggatgcagaatgctgcatttgtctttccgcttatgaagacgagacagagctaagagaacttccttgtggccaccatttccattgcggttgtgtggataaatggctttacataaatgctacttgtcccctctgcaaatacaacatcctcaagagtagcaactacgaagaaggcgaggaagtctag

SEQ ID NO: 2714 - DNA, 1938 bp, Arabidopsis thaliana
  Clone ID: AT_F27F5.C1.o26.tg
atgcagggagagagggctagtcttggttctttatcaaaggctttgaactttgagcgcggttctacgtctagtaacgctgtggtagatcagcaaattcgttgggagaatcttcacaattatggtgataatgatttgcaggattacatgagttcagctgctgatacaaatcctacttttgcaaactcagtttatcatgagaaacggggcttgcagaggtttaacattggtgaggctagctctagtgggacgaagaacgaaggggcaagtctcactgaacaatggaagggaattggaaggtttgaggaacagaggaatgataagcttgagttgagccctttgtttgtgcaaccatctaatggaagccgcgtggttcgtgatgtcaatctaaatgcagaatacaatgagcatcttgaggatatgaatccggttacagttcatcctggtcattttgaggttaatggacttaggtctgagtttttactagataacagtgttagagctggttcctctgttgatggacgtcgtgcatcctgtaaaagaaaagctcttgatgcaagcggtggtcagtcctcttcaactggaggtttccgtgagttccagcgtggagtatccagttcttggatctcaggtcctacgtattacagcccagcaatgacagcaaatgatttaaacatatctcttgatcatggtcgaaggggtttggtatctagcgctgttccaaatctatctcctcctaccatcacagagagctctagtagaaattaccctgtctgggttaatcccacatatcaacaagaaaccgtaagcaattttgctccatccttgaactcaccagggcttatacctgcagatcaccagcagatcagcatgagatatggacatgcgttaggcaattttgcatctcagaacccaaatgctcctgctactcatatgccccctgtttcaagaaatacatttcaatggaacacaagccccgtggcagcggttatatcatctagttctgctactcctgttgacagaaatgttattcatcgaaatgcaaccagacaaagaagtaatactctagagattcccttgtttgtcccagctcctgaactgagaaatgtggcccatggtcatattagcagaaatgcaagtggtgctagacatgttgcatcgtcttcatccaggacaagtgttcagccatcaccgtctagtccagcattgactccttaccagaataactcactacataatcaaagaagattatctgaaaactttcgtaggtcattgctttcttcccttgttacacagcagagggctgctcgttcattggcccatcctgcctctccaaatgagcacgtgcttcaatctggtggtgataacacctctcaggtgcataatcgagcttcctcgagagcaggtccaagacaagggcaagatgcaactggcatttctcattctttgcgaggcttggcatccacaagtcgaggaagaaccagaatgggggcatccgagatccgtaacatcttggagcacatgcgtagagcagggaacttgcgtttggaggatgttatgcttctcaatcagtccataatgctaggtgcggctgatattcatgaccgatatagagacatgcgacttgatgttgacaacatgacatatgaggagctgttgtctctagaagaacggattggagatgtttgtaccggtttgaacgaggaaaccatatcaaaccgattgaagcagcagaagtacaaaagtagtactagatcttcacaagaagtagaaccatgctgtgtttgtcaggaggaatataaggaagaagaagaaataggaaggctggaatgtggacacgactttcatagtcaatgcatcaaagaatggctgaagcagaagaatctttgcccgatttgcaaaacaacaggattaaacactgcaaataagccacaaagataa

SEQ ID NO: 2715 - DNA, 906 bp, Arabidopsis thaliana
  Clone ID: AT_F12B17.C1.o270.tg
atggcgtttaatcacagaaaaatgcttctttcatgtctacagtttaaagatttacgcttttgtttccggcaataccctcccccgccaccaccaccaccgccaccgagggagctctctctcctactccccacctcgatctgcgtcgtcggctcaatcatactctttctatttctagtcttcttcctctacctccacatcacgcaacaacggcggatttcagccgccagcgtaactcccggtgacacaaaccaacaggaagatgaggacgaaacagaggagagagatttctccgactttcatcacgtttggcaaatcccaaccgtcggtctccaccgttccgcgatcaactcgatcacagtcgttggattcaaaaagggagaagggataatcgacggcacagaatgctctgtctgcttaaacgagtttgaagaagacgagtcgctgagactgttaccaaagtgtagccatgcctttcatctaaattgcatcgacacttggttgctctctcacaagaactgtcctttatgtcgtgcccctgtacttcttatcactgaaccacctcatcaagaaacagagacgaatcatcaaccagattctgaatcgagcaatgacctccgtggaagacaagacagttccagatctagaagaaaccataacatttttcttccaagggcacaaagtgatttggcaaactactgtggctcaggaagagtagaaaacgtgagaagatcgttttcaattggaggaagcttatcactttgcgatggtattaacaatgctactagaagtggaagacagttctataccagcttcagtgctaacttgttctcatcatcaagaagagtaaggaacgaacaaccgattccacaaaaccaaatgccatccgtaactggtaacaccagttaa

SEQ ID NO: 2716 - DNA, 579 bp, Arabidopsis thaliana
  Clone ID: AT_MNJ8.C1.o40.tg
atgatcctaccacaagatcaagggtttagaaacaccgtgttcgtcaatctacaagatgtggtcaacgagttagctgaagatcaaaacggtgtcgtaatgtgtttgggaacgttcgcggctccacttatgactaaaatcgaattgaaaccatcatgtctcagttcacatcacatctatcaagaccttgacgagttcatcacacatactgagttttgtcgattgttgagcgaaaggatcgttttggattgtgctcatattccccaaccttttagtgtgtccttatacgtggaagtgacaagagatgttatgttctcgtctattgctgttaggtcgacagatacgtttcaaagattgcttgaggaacaaacaatggaattgactgatttgggagatgaagaagaaaccacttgttcgatttgtttggaggacttttcggagagtcatgatgataacatcattctgttacctgactgtttccatttgttccatcaaaattgtatctttgagtggcttaagcgtcagaggtcgtgtcctttgtgtcgacgagtaccgtacgaggaagatcttgaaacagagtga

SEQ ID NO: 2717 - DNA, 525 bp, Arabidopsis thaliana
  Clone ID: AT_T8L23.C1.o19.tg
atggttccagaaatcactattgatgttaacgtctttccgagtccacgcaagtcttcatcgaatacagtggagatcaatctcaagcgtgagagcgacgacaagtgtgatgatgctcctctgttccaaatcactcaacttatcttaaaagacgtcgttaactttgatccacacaagacctctcctctcctcgaaacaatctttccagacagtatctcaggcactcgtctttgcgttgagatggctttagcatccgaacgagttccagcgccgtttgacatgtaccttcacgtcacagtgagattcgtcgaagaatccacttctagttctcctctagaaaacaagacatgcgctatttgtttggaggatatgtcacaggatgtacatgactatcaggagatgccgaattgtccccatgtctttcataatgactgtatctacaaatggttgggtcatagtaatttgtgccctctctgccgcactgttcttgaagatgaagatgacgacgattatccctactactcctaa

SEQ ID NO: 2718 - DNA, 582 bp, Arabidopsis thaliana
  Clone ID: AT_F26K10.C1.o150.tg
atggagattgagaaggatgaggacgacacaacattggttgattctggaggagacttcgactgcaacatatgtttggatcaggttcgagacccggtcgtgactttatgtggccacctgttttgttggccctgcattcacaagtggacttatgcgtccaacaattcaagacaacgagtcgatcaatacgatcataagagggaaccaccaaaatgtccggtatgcaaatctgatgtctccgaggctacgcttgtcccgatctacggacgaggacagaaagctccccagtccggttcaaatgtaccgagcagaccaactggtccggtttatgacttaagaggagttggtcaacgtttaggagaaggggagagtcaacgttacatgtatagaatgcctgatccggtgatgggtgtggtatgcgaaatggtataccggagactatttggagagtcttcgagcaacatggcaccttaccgcgatatgaatgtccggtctaggcgacgggcaatgcaggctgaggagtcattaagcagagtctacttgtttctactttgcttcatgtttatgtgtctatttctcttctaa

SEQ ID NO: 2719 - DNA, 717 bp, Arabidopsis thaliana
  Clone ID: AT_T20N10.C1.o70.tg
atggctattcctctgttccaaatcaacccaattatagttatgattcggatacacgatcgtcgggttggcgagttcctgctttctcttcgcggaatgcttggtctaggagtaattcaagatttagtaccaccatcacatactcggcatcagattccaatccgtaacagcaacaacctgcgaagacaacacctcgaggcactaagacaagccgttcacaaccaatcaactagacccgagagcagctcaagatcatcatcacaaaccaatgaagaagacgagatcctcaaacatctaacaaaagaaacatataacccagttccaaaaagcacccttctcagaagcctgagcttatactacagaaacaaaaacccgggaagcgaaagctcaagaaacactcaaaatctctcaggtgaagaagacgacaaaagatgctccgtgtgtttagaagacttcgagcccaaggaaacagtgatgctcactccttgcaaacacatgtttcacgaggaatgtatagttccatggttaaagaccaaaggacaatgtcctgtctgtagattcgtcatactcaagccgacaaaacaagactcttctcctccggctaatggatcaaatctcaccggagacatgacaacgaatgatctcttcacattagagctactctctgtggtaagagcaatggaagaaactttccttttcggtaatcctcgtcgccgctag

SEQ ID NO: 2720 - DNA, 1731 bp, Arabidopsis thaliana
  Clone ID: AT_F2D10.C1.o27.tg
atggcttccattagtagcttacacagatgggcatctaatcaacactctcgtcttcctcgaatcacttctatttctgaggctgaccaatctcgacccattaaccaagtcgtcgccttttcggttcctatatccagaagagacgcgagtattattcttctcagctcgattccattgacaagcttcttcgttctaacaccgagctcttccgaagctagagagagacgtagcagaaaagttatccctctcgaggaatattccactggccctgaagggttgaaattctatgacattgaggaaggcaaaggtccagtagcaacagagggatcaactgctcaggtgcattttgattgccgttacagaagcatcactgcaatttctacccgagaatccaagcttttagctggaaaccgtagtattgctcagccttacgagttcaaggtgggatctacgccaggaaaggaaaggaagcgtgaattcgttgataatccaaatgggttattctctgcacaggctgcaccaaaacctcctccagcaatgtatttcattaccgaaggaatgaaagtcggaggcaagagaacggtgattgttcctcctgaagctggttatggtcagaaaggaatgaatgagataccgcctggagctacttttgagttaaacatagagctgcttcgggtgactcctccaccagaagagaagtctctgaaaattcatgccaaggagaagtttccggtgaactccaaaactcgcctgcagcttcatggagagctagatacaggagctggagtgccaagttacttctgtgcaatgataagatacttttttcatgaggcttcaacaaaccttggagttggtttgcattatgataaacgcgaaaagcttcggtgtcttgtacgtgggaaaaagaagtttcctgtgataactgatgaggttgtaacctttaatatcaaaggaagatgtgattttgaccaggacttagttcagaggaacgcaaaaggagctgctgaatttgattggaacatatggaagtttcagaaagatcaggatttacgcctcagaattggctacgaaatgtttgagaaggtacgctttagcttaccgtttaacaaagagaacaacaatggttcttattggatcattgaacactatgtgttggctttctctgttacagaatccaacactccgtctccggcgattgataactccaccgccgcgttgaattctgatctcgtcgtcatcctcgctgctctcctctgcgccttgatttgcgttctcggcttaatcgccgtttctcgatgtgtctggctccgtcgtctcgcagccggaaacagaacagtctccggatctcaaactcaatctcctcaacctccggtggcagcggcgaacaaaggcctgaagaagaaagtccttcaatctctcccgaagcttacgttctcgccagagtcacctgagtcggagaaattcgcagagtgcgcgatctgtctagctgaattctctgccggcgacgagctccgagttttaccgcagtgtggtcacgggttccacgtggcttgcattgacacgtggctaggatctcactcgtcttgcccttcttgccgtcagatcttggttgttgccaggtgtcacaagtgtggaggtttacccggtagctctagctccggacttgaatccgaacccgaaatcgagatccgaatcaagcaaggcgaagatgaccccaactccttcttgccataa

SEQ ID NO: 2721 - DNA, 1287 bp, Arabidopsis thaliana
  Clone ID: AT_T10O8.C1.o160.tg
atgtctctaccggattctctcccatcttcttcttcttctccgcctgtgacccgtgaagaaaccggctttcatcgctttgaacatcacggcaacgattccggttttgatcatcgtgatcgtccaccgtggaatcgttctgagtacgattatcgccatggaagcgttgttgcatctgagaacgtcaggaacaattccacttctgaagacccttggtcttgcgttgtcgtcgttgctaccttctgtatctttggtaatgtcgatgactttgattctggggctttatggaacaacgaatgtctggtggaagaattagggaacaagggatctggtttgatactgtatggattgaaccaagccccacagcttgatgttctgactaaatggtccgaagttcactatctagctgtgcctaatgattcttacaagtattggatacagtatttgaacaaggggtcacgcgtaaaagtttcatacaacgttgaatctgtgggttcttccttataccttgtgatagcccaaggtgtggatgggctctctgagtgggtacaagatccgacgcgtccagacactacactgtcgtggcatataatctctggcaagtgtccaagtggttatattgagcaggacataactaagtcgtcgagttattatgttgcagtaggcaacgtatacctgaatgaagtgaaggcgacgattgacattcaagttgagggggtattgtatgatactacaaatgcttattacaattgctctttccctaacgacaagtgcactctaagtgttccattatttggaactaatgctgctgtactaacctcaccaggtccaaagctgaacaattctaagaatgagttctgcgcaaaactctcatatgaaccaaggtggattgcatacatagtttgcatgggtgtagtgacagcactcttgttaattgtctcgagtctcttcaataaacgacaaccagtcactgaagatgaaaccgttgatgaaaatgatgatgtagctcctctaattccgggaaaagacgatgataactcaagctggtgctcgtcctacagttctattttgacgagtacagaggaattggaaggtgcacatggtgaaggccacagtagtacaagatatctatgtgcaatttgctatgatgcgcctagagactgtttcttcctctcttgtggacactgcgttgcttgcttccagtgcgggacacggatagctgaaacttcgggtttttgtccggtatgccgtaagaagatcaggaaggtcaagaagatcttcaatgtctaa

SEQ ID NO: 2722 - DNA, 1074 bp, Arabidopsis thaliana
  Clone ID: AT_F23J3.C1.o160.tg
atgactatcttcacaagagatttcagccatcggatcctagcatgtgttttattgccactcttccttttccaatgtttgccttacgtaacttgccagcaagggtcggaatcagcaggtcgcaatggaaaaagtaaagagtcatcgataattgggatcgttttgctttcgttgttcctcttacttttggtcgtttattgcttaaactatggatgttgtattgaagagaatgagacaggaggtcatgaagtgttacacagtagagtgaggcgtgggattgacaaggacgtcatcgagtcctttccggctttcctatattcagaggttaaagcgttcaagataggcaacggcggagttgaatgtgcaatttgtctatgcgagtttgaagacgaagagccgctacgttggatgcctccttgtagccatactttccatgctaattgcattgacgaatggctctcttctcggtccacatgtcccgtctgccgtgcaaatttgtctctgaagtccggtgacagctttccacatccgagtatggatgttgaaacgggaaatgcacagagaggtgttcaagaatcccccgatgagagaagcttgacaggtagtagtgttacatgtaataataatgcaaattatacaacacctcgatcaagatctacagggttattgtcgagctggcatgtgcctgagctattcctccctcgatctcattcgactggacattcattggttcaaccatgtcagaatatagaccgattcacactgcaattaccggaggaggtgcaaagacaattggtaagcctgaacctgataaagagaagccatatagccttacctcgagccaggagttctagacagggctacaggagcggaagcgttgggaacgagagaaccggtttctctcaaggacggcaaacactcaggcgagccatatctacgtcgctatctttctcttttcaacctgctcctgttcggtccacacttgacagggacaatctaatgcgagagacttcccaagctaatgacaaagattttggtgaacggtcattccaacgcctcatgccagagaaaaactaa

SEQ ID NO: 2723 - DNA, 699 bp, Arabidopsis thaliana
  Clone ID: AT_F14F8.C1.o170.tg
atgggctgtgtttcttcttgctttggggtcgatgactttgaggattaccccaatccaagtagttctgttaacagaagctgcccatgcccgagatgtcttgttaacaacttccttaacctgtatatctctttattcagaagaggcgaaacccgctctctcccatcctccttacaggctactaatgtatcgatagctacatcaacttcgtatgataactttatgtctaatacattccattctactccaaggcctctgccttatgacgctgatccaagatacttccggtcaaggcgtgattcgcttgtttctagacgcgataagggttcaagtcattctcatgaggaagctgagcccttaagaagtgatgctgatgtggattctgagtctttctcagtggaaggaagcaaatgggctaacaagcttattatctctggtgaagattccaaagaagagttctctagatcctctcggaggattcttcagtcaaggacaatgtctactagtaacgaaggcctgtatataacatctgatgatgaagatgtctgtccaacgtgtcttgaagaatacatatcagagaacccgaagattgttacaaagtgttctcaccatttccacctcagttgcatttatgaatggatggagagaagtgaaaactgccctgtttgtggaaaggtgatggagttccacgaaacaccgtaa

SEQ ID NO: 2724 - DNA, 621 bp, Arabidopsis thaliana
  Clone ID: AT_C6L9.C1.o30.tg
atgagtatgagttctcgtcctgaagtggaagttcacgtcaccaacggaaggaaactctctccatcagaaccaaactcagtcatcatacgcctcaaaaccaaatctgtagagatcattattgaaaaccaaacaaccggtcgccaaaaccgccggactcaggtttcaccaccttttctcatcgatatcaatctccgtagctctagtcacgaccacatccgaacgcttctccacgatcgattagtcggctacccctttgagagttacttgtgcgatgacttagccccaaagatctcaacggctgcaatagacttaggttttgggcacaacggctttaccttgaccatggccgctacagttacttaccggaccgtctcagttatgtcaaacgacgagaaatcattgaggatggttctgctagggagaatgaaagcagaggaattcaagagtttgaagatggaaacagagccgtgttccatatgtctcgagagtctagtctccggtccgaaacctagggacgtcacacgcatgacttgttctcatgtcttccacaatggctgtcttttggagtggctcaagcgtaagaacacttgtcccctgtgtcgtactgagatctacgattga

SEQ ID NO: 2725 - DNA, 1608 bp, Arabidopsis thaliana
  Clone ID: AT_T17M13.C1.o17.tg
atgtcctcggatatgcgtgacgagcgtttcttttatcatcgatatctttccgttacaaatagaacaactccaactacggcaacaaacttgccaacatcgacatcgaacatgcgatctacgagtttgatgacaccaagggttgcacatacttcaatgtcatctggaggagattttcccgacgaccgttttttccatgctcgtcatcagtccgctacggatagagcagcttcaaatagaagcagggcgatcatgcccatatcgacaacaaacgtgccatcatccacatcaaactcacctagggttttgcagacctcaatgtcgagacgaggtacctcgccaatgtcctcgtcgacgaggaggagtgtgcaagcatccatgtcagcacgagaaaccgtaccatcgtcgacatcaacgaggagcatgcaaacgtctacgtcaaccccggaaattatgcctacatcatcaagaaatgtgataacaagcagcgaagaagtagcaaatacattcactcaaacttcttacatacaatttgggagcctgtgggagacgaatacaactccttcaactaggagttggccgaccgtgccatcatcaaactcacctagagttttgcagacgtcaatgtcgagacgaggtacctccccaatgtcctcgtcgacgaggaggaatgtgcaatcatccatgtcaggacgagaaaccgtatcatcgtcgacatcaacgagtagcatgcaaacgtcaatgtcaacaccggaaattatgcctacatcatcaagaaatgtgataacaaggagcgaagaagtagcaaatacattcagtactcaaactccttacatacaatttgggaggctgtgggagacgaatacaacttcttcaactaggagtaggactaccgtgcccacatcgaccacaaacgtgccttcatcaaactcatctagggttttgcagacgtcaatgtcgacacgaggtaccttcccaatgtcctcgtcgaccaggatgagtgtgcaagcgtcaatgttggcaccaggaaccgtatcatcgtcaatgtcaacagtagagattatgcctacatcggcaagaaatatgataacaatgagtgaagaagtagcaaattcattcactcaaacttcttacatacaatttgggagcttgtgggagacgtttaaaactgtaacaaagttgtcgcgtgtagcgatggtggagaatggagagtgtgtgatatgtctggaggaatggcgcaaagaaacgtacgtaacatcatcgacatcgaacatgcggacatcgagtttgatgacactaacgaggttcatcgatgagcaaatatctttacgagcaaccgtttcgtcgacgaggacgaccgcacggttgttgactaatgaatcgccggcaacgatacgggcggtagcgatgttaccacgtgtagcgatggtggagaaaggagagtgtgtgatatgtttcgaggaatggagcaaaagtgatatggaaacagagctgccatgtaaacacaagtatcacttggagtgtgtggagaagtggttgaagattcacacctcgtgtcctcaatgtagatacaagctttcttgtgtatataaaagctttttgatgttgtga

SEQ ID NO: 2726 - DNA, 651 bp, Arabidopsis thaliana
  Clone ID: AT_MNJ8.C1.o70.tg
atggaaaccgaaactttgagactacaagtggctacgaggatgtcgaagctaccttcgaatctagggttcacaagtgctgtccaaatcgaactacacgaagtaatccatgagatgctcgaagatgttactggaacaacacccgtggtggcatcactgtcgccaatctctcatgttctcctgaagccacgtagcttcctaccagaacagctctcccgtctccttcgtcgtcaacttcaccgtgatacttctatttgtgaatctttggctgagaaaatctcttctcttcgattttcgcgtgctaattacactctctatcaaagaccttttctcatgacggtgaaagtgagagtcatcaaagaggttcggtttatcgtatcccctgtttctgctccgtcgagtggtgctccggtggatgtgtttcagagattgcttgaggaacaaactgtggaaccgtccatggattccgatgagtcttgttcaatctgttttgagaagctgtctgattcgttatcggagacttatcataacagcatcattcagatgcccaagtgtttgcattcgtttcatcaaaaatgtatttttaagtggattggtcgtcaaaattcgtgtccattgtgtaggagagttccgttcgaagaggatgaagattag

SEQ ID NO: 2727 - DNA, 825 bp, Arabidopsis thaliana
  Clone ID: AT_T20O10.C1.o70.tg
atgggaggaagtgctagtctccagtcagactcgatggaagcagcagcagcagcagattcttcgattcccagagacaaagactttggcaaattccaattcggatgcgagcactacaagagacgatgtaaaatcagagctccttgctgcaatctcatcttctcatgccgccattgccacaacgactctgcgaattctcttcctgatcctaaagaacgtcatgatttggtccgccaaaacgtcaaacaggttgtttgttcaatttgtcaaactgagcaagaggttgctaaagtctgctcgaattgtggcgtcaatatgggagaatacttttgcgatatctgcaaattctttgacgacgatatttcgaaagaacagtttcattgtgatgactgtggaatttgtagagttggtgggcgtgacaaattctttcattgccagaactgtggagcttgctacggaatgggcttgcgcgataaacactcgtgcattgagaactctacaaaaaattcttgtcctgtctgttatgagtatctatttgattcggtaaaggccgcacatgtgatgaaatgtggtcatacaatgcatatggattgctttgaacaaatgatcaatgaaaaccagtaccgatgcccaatttgtgccaagtcaatggtggatatgtctccttcgtggcacctattagatttcgaggtttcaattctctgcaatgactgcaacaaggggagtaaagctatgttccacattttgggacacaagtgcagtgattgcggttcatacaacactcggagaatctcaacgccacaagatccagtgagtgaaacagagtga

SEQ ID NO: 2728 - DNA, 3627 bp, Arabidopsis thaliana
  Clone ID: AT_T6K21.C1.o90.tg
atggttcgtgggttggtgaatttcaccggattatcaacgaggttattaaacatttgcgttgattcactctgcaaattccggaaattagagaaagctgagtctttaatcattgacggaatcagattaggtgttgatcctgatgtcgtcacttacaacacactgatcagtggctattgtcgattcgttggtatagaagaagcttacgctgtgactcgtcgtatgagagacgccggaattagaccagacgtagctacgtataattctttaatcgccggagcagctagacggcttatgttagatcatgtcctctacctgttcgacgaaatgcttgagtggggaatttatcctgatttgtggagttacaatactttgatgtgttgttattttaagctagggaaacacgaagaagcgtttcgggttctttataaggatcttcagctcgctgggctaaatccagacaatgctctagagctttttaaagagatgcagagtaggtttaaaccggagcttatgacttataacattcttatcaacgggctttgtaaatccaggagagtcggtactgcgaaatggatgctaacggagctgaagaaatcaggttacactccgaatgctgttacatatactacaatcctgaagctatattttaagaccaggaggattagaagagggcttcagttgttcttagagatgaaaagagaagggtacacttatgatgggtatgcgtacttcgcggttgttagtgctttgattaagacgggtagaacgaaagaggcttatgagtatatgcaagagttagttaggaaagacgggaatttggatgcggtcgatgatttgttaggagagatagagcggagaggaatgaaagcggatgagtatacacacacgattatagttaatggtttgttaaggacaggacagacgagaagagctgaggagcattttgtaagtatgggagagatggggattggattgaatctcgtgacttgtaactgtttggttgatggattgtgtaaagcgggtcatgtggaccgggcgatgagatattttgagtcgatggaagtgaaagatgagtatacttacacctctgttgtgcataatctttgtaaagacatgaggtttgtttgtgcttcaaagctgctattgtcgtgttacaataaaggaattaagattccgacatcggcgagacgagcggttttgtcgggtttacggatgtctggatgttacggtgaagcgaggaaggcgaaggccgaaatgaaactgaccctggtaatcatgggtcgtgtaaggttagtcactcctagttcgagtgaaagtgaagacgagagggtcacgatcatccgtgaagcggatatgaaccgtgaagaagtggcagaggaaaacaaatttgaagacgaaaactgtgaacaagagtctccggaaaaccttaacgaaccggaagaagaaaatatttctgaggaaggtgataatgtggaaccaatgcagtctcaggggatggaagaaaaccctgaagaagaggaaaaagaaggggaagaagaagaagaatctgagggaaatcaaaaccctaatttcttttcaatccaacccaaaacttaccagagaacttggatctggcgggatatgagaaagattcggcgtcggcggaggttcgtcgtgttgttcgtcggcggaagttcgtcgtcagaaaagagagaaggagagaagaaaagttttcgagagaagaaaggagaagaaggaaataaagaaagagagagaaaattttctaactcgccggtaaaattagagctcaaatcgccggcgaaatcggagctcaagtcgccggcggcgaagtcggaaaaaatcacgtccgaagtcgtcggagagaatcgcgggagcaacgaccgttctatcagaatgggtttatcatgggacaggcttgttgtcgttgttggtactgattctttctgtgactgccaaaagagaggacagtctctctcgtttagagcaagtgtatcttcttatagagttgctctgatgcttattacatgcttgtgtatcttggctgttgactttactatctttcccagaaggtatgccaagacagagacttatggtactagcttgatggatcttggggttggctcttttgtgttggctaatgctgttgtttctcggcaagctagagacgtctcatcaggaaactggataactggaattaaagcaaccgctccattgctattactcgggtttattcgtcttgttaccacttcaggtgtggattatcaggtccacgttacggaatatggagtacactggaatttctttttcacacttgcagccatatcaattctcacatcgtttgttaacataccagccaagtactgtggactcctaggtttcgctgttcttgcagggtaccaaacttggttgcttagtggactgaacacatatttgctttcggacgaaagaggaactgacattatcagcaaaaacaaggaaggagtatatagcattcttggtaagattttgacttggttattggggcatgtaccttcttggcgttcacttaggattgtaactatactttttgacaactacgttgagaggatctcccgtcgaacggcgttggggatatttatgctgtctagttacatacctctgaacaagctttcatcacttgaagaagcaattgaccaaaatctgttagcaacctttctgctttctgatccaaatcctagtgcttggaatcaatacataaacccaagagattgtactcaaggcttatgttccacattttgtcctcaatggtgtacttacatcaacttctctccaccaccaatttcttatgaacaattcctaaacgatggcgttgcatcaaaccccaatctctcccctcttgtcattgctatttttggaatatttgcaactgcctttctcttggcagcttactacactcttgtctcaaagtattgcgccaacgacaccaccaatgaagctgcctcagaatccggaagatcggatataattctcgacgttaactcgccggaaagaggagaccaagacgatccttttgctcttgagtcttcaaccgccggcttagatgatactctcataaaaaagatcggtttcttcaagttaaaaaagcatcaaaacggtttcaagatcaacggtacggattgttcaatatgtcttggagagtttaacgaagacgagagcttaaggttattacctaaatgcaaccacacctttcatgtcgtttgtatcgatcggtggctcaaatctcactcaaactgtccgctttgtcgggctaagatcatcgtccctaccactcaacaacctgaacatcatgttgtggtgatgaatcttgatcggtttacgagcaatgttggatcagcagaaggaaatgtagtcgttgatgatcatcgtgaagaggttagtgtttcgattagttctcatcatccaagttggttctcggccgcggatattgttctgcggataagcagggacggagaagaggaagagggaaattatgatcttgaaaatggaaacagagagaaacttgtagacttgaaaagatcattctcaagtggtggcttggttcttgggactcaaggaaggactagaagatccctaaacatatgtccttaa

SEQ ID NO: 2729 - DNA, 396 bp, Arabidopsis thaliana
  Clone ID: AT_F21J9.C1.o80.tg
atgggtctctcgcattttccaacagcgtcagaaggagtactaccacttctggtgatgaacacggttgtttcaatcactctgttgaagaacatggtgaggtctgtttttcaaattgttgcatccgagactgaatcttccatggagatagacgacgagcctgaagatgattttgttactagaagaatctcgataacacagttcaagtctctatgtgagaacatagaagaggaagaagaagagaaaggtgtggagtgttgtgtgtgcctttgtgggtttaaagaggaagaggaagtgagtgagttggtttcttgcaagcatttcttccacagagcttgtctagacaactggtttggtaataaccacaccacatgccctctttgcaggtccattctctag

SEQ ID NO: 2730 - DNA, 753 bp, Arabidopsis thaliana
  Clone ID: AT_K3G3.C1.o4.tg
atgattcaaatggatggtggagataggctgagagtgactttattagatcgtatgtcaacggttgagagtagccggagctgtttaactcttgaagctattctaatggctgataaaaacagaacctcgccgcagattctctcaccaccgccgtcgaggagccaatctaaccggtcacttgttgaagtcatgcaaagagagcaccgacacagtagagataaaaccgcttggaaaagtctccgtgaaaagctccgtcttaaacgtaacggttctgtttggatctcgtctaattctatcccgagtttggatacgcctattcctaaccgggataacgttagccaccaacttggtttcctcctttctaactctggaaatgtaacagaggaagcttcgtcggtggagggaaggattcggttaggagctgtgttggcagaggagagagcattatcggctagagaagaggaaacgccggcggagagggaagtggagccggcgaggatgtcattgatggagttgttggaagagaatgaagggcaaatgagttttgtaagtgtcgacggagaggcggaggaggaggtggcggcagtgacggcggcggagataagttgttgtgtgtgtatggttagaagcaaaggagctgcgtttattccgtgtggtcatacgttttgtaggttgtgttctagagagctttgggttcaaagaggaaactgtcctctctgtaataccacaattttagaagttcttgatcttttttag

SEQ ID NO: 2731 - DNA, 915 bp, Arabidopsis thaliana
  Clone ID: AT_F25G13.C1.o190.tg
atgaccatgcccttcgcgttggagatctgctctgctgctatagaattgcggattctagtgcaaatagaagggaagttgtcggcgaaagtggattttgtggttcttgtcttcaggtcacattttattattgacaagatgattcaaatggacggtggagataggctgagagtgacgttattagatcgaatgtcaacagtggagaatggccggagctcagtgactttagaagatattctgatggctgaaacgagcagtttccgatctcttactacgccgacaactccggtgaggaatcactctagtagtagtttacttgacgtgatgagaagagagcgtcgccgtgataaaaccgcttggaaatctctccgggataagctccgtcttaaacgcaccgctactggttggatctcgtctaatcctatccctaccttggataatcatattcttactccggataacgacagccaccgatttaaccgccttggattcctcctcactaactcggagacaaaccggagcagtcgtgacgtcagcgacgcagcagaggaagcggcggagcgagaaggaaggctccggctaggcaccgtgttggcggcggagagagaggaaatgcagccaccgaggatgtctctaatggagttgttggaggataatgatggacatatgtatgaactcagcgcgcgagacgaggtggaagtggagggaagagatggctgcgacgggggaggagaggcggtggcggtgacgggggcagcggagttgggttgttgcgtgtgtatggtaaggagtaaaggtgcggcttttataccttgcggacatacgttttgtagattgtgttcgagagagctttgggtacagagaggaaactgtccactatgtaacactgccattttacaagttcttgatattttctag

SEQ ID NO: 2732 - DNA, 1557 bp, Arabidopsis thaliana
  Clone ID: AT_T14P1.C1.o25.tg
atggctttacttgagaaactgcaggttatatctgttgtgaagctttcctccattcgaaaatttcaggttgaaaaagatagtatagtctggaaggaaagggagataaatataaaaaatgaactaggtgatgtttctcgaaagacgtctgctgttactgattctagaatggcttctttggattcggagatacagaaacaactggatgaaaaaatgcgaatcaagactaggctgggaaatatatcaagagagcgaggtagaaaagaaatctttgcagatatgaaggcattaatttcttcgttccccgaggaaatgagttccatgcgtagtcaattaaacaattataaagagactgctggaggtattcattctctgcgggctgatgtccagtccctctctggggttctatgtaggaagacaaaagagtatgaagcattgcaattgagatcagctgattatgcttctcagttaggtgacctgaatgctacggtttgtgatttgaagaacagtcatgaggagttaaagttgtttctggacatgtataaacgtgagtccactgatgcgagggacatagctgaagccaaggaacaggagtacagggcttgggctcatgttcagagtttgaaatcatcccttgatgagcaaaatctggagttgcgcgttaaggcagcaaatgaagctgaagccgtttcccaacaaatgttggctgctgcggaagcagagattgctgatttaaggcagaaaatggatgattgtaaaagggatgtcgccaagcattctgatatcttgaaatctaaacatgaagaacatggaacatatctttctgaaatacagacaattggaagtgcctatgaggacattgtaccgcaaaaccaacagcttttgcttcaagttacagagagggatgactataacatcaagcttttcttggaaggcataacttctaggcagatgcaagatactctgcttatcgataaatacatcatggataaggatatacagcaaggcagtgcatatgccagtttcctatccaagaaatcatcaagaattgaagatcagttgaggttctgcacagatcagtttcagaaactagcggaagataaatatcaaaagtctgtttctcttgaaaatctgcaaaagaaacgtgcagacatcgggaatggcttggaacaagctaggtcaaggctggaggagtcccattctaaagttgagcaaagtcggctggattatggggcattagaactggaactggagattgaaaggttcaataggagaaggatagaggaggaaatggaaatagccaaaaagaaagtttctcgtcttcggtctctcatagaaggatcatcggccattcaaaagctccgacaagaactcagtgaatttaaagaaattctgaagtgtaaggcctgcaacgatcgcccaaaagaggtggtgattacgaagtgctaccatttgttctgcaacccatgtgtgcaaaagctcacaggaactcgacaaaagaagtgtccaacatgctcagcaagttttggaccaaatgatattaaacctatctacatatga

SEQ ID NO: 2733 - DNA, 681 bp, Arabidopsis thaliana
  Clone ID: AT_MBG8.C1.o26.tg
atgaagaacagctacaagcatgaactcatctcaacctcaacgaacgaaactgatcgagtcattaatcgttgctttctccggaaaaagaccacaaaagaagtcattcatctcaaagcttctcaggtcgaatcagattcgtattccttcatcgtaacttaccagccaaatcttcggattcgtcatgaaaatctcgatggacaccaacttaagaccactcttgaacgtcatcccgatcgtgtatttaaactcgaagacaacatcccaaaacagtttcttgtctctcaagaaacatgccttgaacacgtcatgatcatcttgtcggcgatgtatctcccgcaaactattcaagaacgtcttgtccgttacatctcaaccgaatccgtcaagttcagaaaccgccgctgcggaacaggaggaggtttgaaggtagaagttgacgttaaagtcgacgtggaacaatgggtgaggattgattgttgttgtaaacaaaagggtacttgtctggtcccggcgttggattgtccgatatgcttaacggagttatctagtggggtgagtcgcatgaagttaccatgttcccatgtttttcacagagactgtataatgacgtggctgaaaaagaacccttcttgtcctatctgccgaaccaaagctcatggcaaaactgtttctatctattaa

SEQ ID NO: 2734 - DNA, 14121 bp, Arabidopsis thaliana
  Clone ID: AT_MYJ24.C1.o10.tg
atggattcacttcttctcgaagattttgggcagaaggttgatttgacccgacgaattcgggaggttttattgaactatccggaaggaaccactgtgcttaaggagcttatacagaacgctgatgacgccggagctactaaagtccgtctctgtcttgaccggcgggttcacgggtcgggttctttgctttcggactctttggctcagtggcaaggtccttctctattggcttacaatgatgctgttttcactgaagaggatttcgttagtatctccagaattggtggaagtggcaaacatggtcaagcttggaagactggtcgatttggggttggcttcaattcggtataccatttgactgatataccttcttttgtgagtggaaaatacgtggtattgtttgatcctcaaggtgcttatcttccaaatatttctgcagcaaacccagggaagagaattgattatgttggttcttcagctctgtctcagtataaggatcagtttcttccttattgtgcctttggatgtgatatgagaagtccttttaatggtactttattccgtttccctttgaggaatacagagcaagcagcttctagtaggctttcaaggcaagcctactttgaagatgacatttctttgatgtttgatcaacttttcgaggaaggtgttttctcgttgctatttcttaaatgtgtattatctattgagatgtacacatgggatgatggagattcagaacccaaaaagctttactcatgttcggtcagctcaccaaataatgatactgtgtggcatcgccaggcagttcttagattgtcgaagacatctatttctggagacagggagatggatgcatttactctggagttcttgagtgagtctgaaaagggaaaccaaactaaacggagaacagacaggttttacatagttcagacaatggcatcagcgtccagcaaaattggtttgtttgctgccactgcatccaaagaatatgatattcacttgctaccgtgggcttcagtagcagcatgcatatcagacgattcatcagagaataatatcctaaagcttgggcatgctttctgctttcttcccttgcctgtacgaactggattgacagtacaagtcaacggatactttgaggtgtcatcaaatcgtcgcggaatttggtatggagaagacatggacaggagtgggaaagttcgttcagcctggaataggcttctcctggaagatgtggtagctccctcttttgcacgattgctactttgtttgagagaagtgcttgattccagagattcttacttctccttatggccaagtggatcttttgaagcaccatggagcatattagttgagcaaatttacaaaaatatctgcaatgctcctgtactgttttcggatcttgatggggggaaatgggtgtctcctgctgatgcttatcttcatgatgaggaattctcagggagcaaagatcttggtgatgccttattgcagcttgaaatgcctatcgtgtgcctcccaagactagtttttgatatgcttttgaaacacccttcatttttacttccaaaagtggttacgccagatagagtgcgcaactttctcaaagaatgcaaaacgctttcagctttgaagaaatctttgaagctagtattgttggaatattgcctggatgatctgactgatgatagtgtttgcacacaagccagcaacctgaaactgcttccattagcaaatggtgactttggcttcttttctggacgtacaggaagtgtctcctattttatttgtgacgaattggagcatatgcttttacagaaagtttatgacagagtaattgataagaatattcctccaccattatataccaggctttttgccattgcagagtcacgaacagcaaatgttgcaattttcagtatccacaacttgcttcagttatttcctaggcttgtacctgctgaatggaaacacagaagcaagatttcctggcatccagaatccaaccgagaccatccatcatcatcatggtttgttctcttctggcagtatcttgacaaacggtgtcagagcctatcattattctgtgattggccaatcttgccatccacgtctggctatttgtacatagcctctccgcaatcaaaattgattaacgcggagaagcttcccgctgcagtcagaaatgtcttagagaaaattggtggcaaaatattaaacaacaatattaaagttgaacattcagacttgtcctcctttgtttcggatgcaagttacacaggtgtcttggagtccatttttgatgctgcttcatcagatttggatggggttcaaaatttaatttatgatttgaatgctcaagagaaggacgaacttcgtagttttcttttggatccaaaatggcacataggacatcagattggtgacctatacctcagaatctgcaagattttgcccattcatcgtatttatggagaaaccagtgctcaagaatccaagtattctgatcttgttaatcctcctaagcatttacctccattagatgtgcctgcctgtcttctaggatgtgagtttattctgtgttgccaaggcagcgaagaagatgttttgtcaaggtactatggcattgagagaatgaggaaaagtaacttctacagacagaatgttttcaacagaattgaagttttgcaacctgagattcgtgatcaggtgatgatttctattctgcaggatcttccacaactgtgtctggaggatagactcttgagggaagaattgcagaacctagagtttgttccaactgtaaatggtcctcttaagcgcccatctgttttacacgatcctcgtaatgaagagttatatgctttgttggaagattcagattgtttccctgctagcggattccagggatctgctatcttggacatgcttcaaggtttgggccttaaaacaactgtttctcctgagacaatattggagagtgcacgattggtggagcgattgatgcacaaggatctggaaaaggcacattcacgaggtaaagtgcttttttcatttttagaagtcaatgctgtgaagtggctgcctgatcagtcgagtgaggatgatggagctataaacaggatattttcaagagctgcgacggctttcagaccacgaaatctgacgtgtaaccttgttaagttctggagtgaacttaaaatgatttgctggtgccccgttttagtctctgctccatttcaaactttaccatggccagttgtgacatctactgttgctcctccgaagcttgtacgtccaaaaacagatatgtggcttgtatctgcatccatgagaatactggatggtgaatgttcttctacagctcttgcatataacttggggtggttatcacatccaggaggaagtgcaattgcagctcagttgcttgaacttggaaagaacaatgaaattcttattgatcaggttcttcggcaggaactagctttggcaatgccaaagatatactcaattcttgcaagattactaggttcagatgagatggacattgttaaggctgtacttgaaggtagtcgctggatctgggtaggtgatggatttgcaactttgagtgaggttgttctcgatgggcctcttcaacttgttccctacattcgagtcatacctaccgacttagctgtttttaggggactatttgtggagcttggtgttcgagaatttttaactccatctgattatgctgatgttttatgtagaatagctgtaaggaaaggtacttcacctcttgatcctcaagaaatcagggcagctgtgctgattgcgcagcagttggctgaagcgcaatttcttgacaaagtaacaatctatttacctgatgtttctggtcgactcttcccttcaagtgacttggtctataatgatgcgccatggttgactgcatcagacaatcttaacagctcgtttagtgcagagtctacaatgctattgaatgcgaaaagaacaatgcaaaagtttgtccacggtaacatatctaatgaggtagcggagaagcttggtgttcgctctcttcgtagagtcttgctggcggaaagtgctgattcaatgaattttagtttatccggggctgctgaggcctttggacagcatgaggcgttgaccaccagacttaaacacatactagaaatgtatgctgatgggcctgggattctttttgagctggttcaaaatgcggaagatgcaggagcttctgaggtgacattccttttggataagactcattatgggacgtcttcactcctatctcctgaaatggcagattggcaaggccctgctctgtattgtttcaacaactcggtttttactcaacaagatatgtatgcaatctcacgcattggtcaagcaagcaaacttgaaaaaccttttgcaataggaagatttgggctgggatttaactgtgtttatcatttcacagacatccccgggtttgtttctggagaaaacattgttatgtttgatcctcatgccaatcatttgcctggtatttctccaactcacccagggttgcggattaaatttgctggaagatatatattggaccagtttcctgatcaatttgcaccattcttgcattttggttgtgacttggagcatacatttcctggtacactctttcgatttcctcttagaaacgccagtgttgctcctagaagccacataaagaaagaaacatatgctcctgaagatgtgttatccctcttcacttccttttctggtgtagtttcagaagctttaatttttctgcggaatgtgaaaacagtatcgatttttactaaggaaggggctggtcatgaaatgcagttactgcatcgtgtttgcaaagatcacaatgttggacaagatactgaaccaaagccatctagtcaagtgtttagtcttcttgacgaaaatatttttgctggaatgaataaagatcagttgctaaaaaaactaagcaacactgtagttaaagatctgccatataaatgccagaagattgtggtgaccgagcaagattcatctggctgtattttacatggatggataacaggagaatgtctgaatgccggggtaagtaaaaagaacttgaaccttccagaaatgtcccataagttaataccatgggctagtgttgccgtgcatataaattctgtcaagaatgaaaatgtggaggatctggctgctagcatttctaatatatttgggccatccactatttcaattcagaatagaagaaattttggggggcgtgcattctgctttctgcctctacctataactacaggcctccctgcgcatatcaatgcatattttgagttgtcatccaacaggagggatctttggtttggtaacgacatggcaggggatggaaaagtacgctcggattggaatctttacttgattgaggaagttgtcgtaccagcctatggtcatttgcttgaaaaaattgcatctgaacttggtccatgtgatttgttcttctctgtctggccagtaactctaggaacagaaccttgggcatccttggttcggaagctctacagttttattgcaaataacggtcttcgtgtcttatataccaaagcaagagggggccaatggatttcaactaagcaagcaatttaccctgatttcagctttcctaaggcggatgagctagttgatgtccttgcagacgctggtctccctgtaattaatatctcaaagacagttgcggaaagatttggagaggcttgttcatccttgcatttaatgacaccccaactattaaggactctgttgactcggcgaaaacgtgagtttagggatagaaatggcttggccttggcattagaatactgtcttcttgatttaaaagttccttttctggcggatcttctttacggtctacccctgctacctcttgctgatggttcatttacaacctttaacaagaatggtactgctgagagaatctttttcgctgaagagattgggtatgaacttttgaaggattcacttcctcaccaactcgtggaccgcgaagtgccggaaggagtttatagtaagctattggctgtagctcaaagcggagaatcatgcatatgtctcctctcttgcaatttgcttgagaagcttttttttaagctactgccagcagattggcatctctcagaaaagatactttggacacctggccaacgaggacatccgacagtagaatggataagggtactgtggagctatcttaagttatcttgtgatgacctctcagtattttctaagtggcccatattacccgttgaagatggctgtctcatgcaacttattttaaattcaaatgttattcgagatgatggctggagcgagaacatgtcttcattattactgaaatgtggatgccggttcttaaatcgtgagcttccagtagagcaccctcagttggaaacatttgttcagccaccaacagcaacaggcatattgaatgcacttcttgcgatttctggtgggcacgaaaacataaaagggattttccttaatgtttcagaaggagaattgcatgagcttcggaattttattcttcagtcaaagtggttctctggtggacatatgaatgaggtccactttgaaaccatcaaacacctccccatatttgagtcatacagaagtagaaaacttgttagtttgaactgtccagttaagtggctcaaacctgatggcatcagggaggatctgttggatgatgattttgtacgcttggactcagagagggagagaactatcttcaaaagatacttacaaataaaagagccctcaaaaatggaattctacaaagcttgtgtacttaatcgcatgtcggagttcctttcgcagcaagaagctctgttggccattttgcatgatctaaatgatctggtcgtcgctgatgtttcgcttcagtgtgcaatatctacaaccccttttgttcttgcagcgaatggattatggcaacaaccttccaggctttatgatcctcgtgttcctgcgctacaggagcttcttcacaaagaagtctactttccttctgagaaattctcagattctaagatcctggatgctttggttggtcttggacttagaacaactctggattgttctacctatctggatgctgctagaagtgtgtcaatgttacatgacttgggagatttagaagcatcgagatatggaagaagattattattccatatcaaaactctttctatcaaactatcatccaagacaggtgaagcgaaccatgatgagtcccaaaatataatgtccattacaagcgaagactcgtttgatggagaaacctatcctgaatatgaaacggagactagctatcttgggagcttgctcactcaacaatcagaggatgagttttggtgtcagctgaggtctatcccatggtgtcctatttgtcttgatccaccaatagaaggaattccatggcttgaatctagtaacttggtagcatctccagatagagtaaggcccaagtctcagatgtttttggtgtctgccacaatgcacttactggatggcgagtgccagtcatcgtatctacatcagaaacttgggtggatggactgtttaactattgatatcctgtgcagacaactaatcgagatatcaaaatcttataaagaacagaagtctcgttcctcagtaaatcctgaatttgagagcatgttacaaagccaaattcctctactttataccagactgcaagaactttctagggaaaatgactttcttgcccttaaatcagcactaagtggtgttccttgggtgtggcttggtgatgattttgtctctgctgatgttctttcttttgattctccggtgaagtttaccccttatctatatgttgtcccttcagaattatcagactttaaagaattgcttctagaattgggtgtgagacttagttttgatgcagcagattatatgaacactctgcagcatttgcagaatgatataaaaggatcacagttaacagatgagcagataaattttgtcctttgtgttcttgaagccgttgcagactgtttttccgaggtgtcatcagatagtgataacaattcagtgctagttcccgattctgcaggatttttggtcccgttagaggatcttgtttataatgatgcaccatgggtagacagcagttctctctctgggaaaaggtttgtacatcctagcatcaacagtgacatggctaatagattggggatacagtctcttcgttgtatctccttagtggataatgatattacccaggatcttccttgtatggatttcacaaagttgaaggagcttctatcactatatgccagcaaagatttcttgttgttcgatcttcttgagttagctgattgctgcaaggttaaaaagctgcatatcatctttgacaagagggagcaccctcgcaagaccttgctgcagcataatttaggtgaatttcaaggaccagctatagttgccattttagaaggggttacattgaccagagaggagatttgtagtcttcagcttctttcacagtggagaattaagggtgaaactctcaactatgggttgggccttcttagctgttacttcatgtgtgatcttctgtctattgtttctggtggctacttttacatgttcgatccccaaggagcgaccctttctgcatccacgactcaggctcctgctggaaagatgttctccttgataggtacaaatttggttgagcgattcagtgatcaattcaatcccatgctaattggtcaagataaggcatggtcattgacagattccaccattatccggatgcctttatcaactgaaatcttgaaagatggatttgaggcggggttagatagagtgaagcaaatatctgaccaatttctggagaatgcctcgagaatccttattttcttgaagtcagtttcacaggtttcattttccacatgggagcaaggaaatgcacaaccacatcaagattacacgctgcatattgattcagcatcagctatcatgagaaatcccttcgcggagaaaaacttgaaaacgtctaaactttcgaggatttttggtagctcaaactctggtgttaaatcacgaataatagaggttaacctacatataggggaaaacaaacttctagatcgatggcttgtagttctcagcaagggctctggacaatcacaaaacatggctcgtggcaggaagtatctagcgtacaatttgacacctgttgctggagttgctgcacatgtatctcgaaatggacgtcctgttgatgttcatgcagccagccccataatgtctcctttacctttgtctggtagtgtgaatctacctgtcaccatccttggatgcttcctcattcggaataattgtggtcgttttcttttcaaaaataaaaatgagagagctatgtcagagccacagcttgatgctggagatatattgattgatgcatggaacaaagagttaatgtcatgtgtacgtgattcttacattgaaatagtggtggagatggaaaggctaagtcgagaacattcaagctcttcaactgagtcaagtacagcacgtcagctggccctttctcttaaagcctacggtcatcagttgtattccttctggccacgatctaatcaacatgacgatgctatagaagcagaagtgctcaaaccagagtgggaatgcttggttgagcaagttataaggccattttacgctcgtgtcgctgaccttcctctgtggcagctttactcaggaagtttggtcaaggctgaagagggtatgtttctgacacagcccggtagtgaggttgctgttaatttgcttcctcttacagtttgcagctttgtgaaggagcattaccctgtgttttccgtgccctgggaattgttggctgaagtccaggcagtagggattccagttcgagaagtcaaaccaaagatggttcgcgttcttcttaggaagtcatctgcatctatcgatcttcgatctgttgatacttttattgatgttcttgaatattgtctatcagatattcaatttattgaagcacttaaccccgaagaggctaacatggatgaaggaaacagtacttctacttcatcgtcgatgtctacgcaagctcaggctggctctagtgatgcatttgaaatgatgacaagcctgggaaaggctttgtttgattttggtagagttgttgttgaagatattggtcgtactggagattcgattggtcaaagaattagtaataatagatatagtaatgctgacccgaggtttctatctgcagttaatgaacttaaaggattaccatgcccgactgcaacaaatcatttagcacgcttgggtatttctgagctatggttgggcaacaaggagcaacaggcactgatgttgcctgtgtctgcacgatttatccatccaaaagtgtttgagagatcgagcttggctgatatatttttgaagtcttctgttcaagcatttttgaagttgaggagctggtctcttcctttactggctagtaatatgaaatatctttttcatgaccactgggttagttatatctcagaatcaaattctgtgccatggttttcatgggagagtacatcaagttctagtgatgatagtggtccctcgcctgaatggatacagctattttggaagaattttaatggatcagcagatgagctctccctcttttcggactggcctcttattcctgccttccttggcagaccaattttatgccgtgtaagggagagacacttaatcttttttccaccaccagctttgcagccagtttctagaagtggtactgatatgcatcagacagacagtgatatatctacaacatcagtaagtggcggtcccttatctgagttaacacagcgctatgtttcaggattcgatctagcacaaagcaagcatccttggctgattttactgctgaaccagtgcaatataccagtttgtgatactgcatatattgattgtgctgagagatgcaagtgtctgccttcaccaagcgtgtcacttggccaagctattgcctccaagcttgctgaaggcaaacgagctggctacattgctgatattgcttccttcccaacatttggccgtgatgagctgttcacccttttggctaatgatttctcttctagtggttcaagttatcaagcatatgaactagaagtactaagttcacttcctatatttaagactgtcactgggtcttatacgcatttgcaaaggcacggtttgtgtataatctctggagattccttccttaaaccatatgatgaatgttgcttttgctatttaccagattcagttgaatgtcactttctccaagcccttggggtcactgtgttacataatcatcagactttagtaaggtttgggttagctgagtttgaaagtagatctcaatctgaacgagaagacatactaatttatgtatatggaaactggctggatttagaggttgattctgatgtgattgaagctcttagagaggcgaaatttgtcagaaattctgatgaattttcctctgagctatctaaatcgaaggacttgtttgatccttctgatacattactagtgtctgtcttttttggtgaaagaaaacgatttcctggagaaagattttcatcagaaggctggcttcgcattctacggaaagctggccttcgaactgcagcagaagccgatgtcatacttgaatgtgccaaaagggtggaatttctgggtaacgagcgtaatagatcttccgaagaagatgattttgaaacggatcttgtacattctgagaaggatatttctgttgagttatcaacattagcaggatctgtaattgaagcaatacttttaaactttgctggtttttacagcactgcattctgcaacactcttggtcagattgcttgtgtacctgctgaatcagggttcccaagtcttggtgggagaaaaggtggcaaaagagtccttacacgttacagcgaagctgttcttttacgagactggccccttgcttggagctctgtccctattctttcaactcagagattcattccacctggattttcgtggacagcattacgcctaaaaagtcctccaattttctcgactgttcttaaacacttacaggtaattggacggaatggtggtgaagacactcttgctcactggcccaatgatccaaatgtgatgaccattgatgttacttcttgtgaagttttgaagtacctggaaattgtttgggactccctcactacttcagatattttggagttgcaaaaggtagcctttttaccagctgcaaatgggacacgcttggtgggagcaagctccctttttgttcgcctaccaatcaacctatcaccttttgcatttgaacttcctagtctctatctaccgtttctgaatatccttaaagatttgggacttaacgatgtgctttcagttgctgctgcaaaggatatcctctccaaattacaaaaactatgtggttatcggcgtttgaacccgaatgagcttcgcgctgtgatggaaattcttcattttctttgcgatgaaataaatacgacaaagccacctgaaataaatactatcaaatcagatgtgattgtcccagacgatggctgcaggcttgttcatgcactatcttgtgtgtatgttgattcctttgggtcacgctatgtgagatacatagacactgcaaggttaagacttgttcatccgcttcttccggagaggatctgtctagatttgggtgtgagaaagctttctgatgttgtcattgaggaacttgaaaacgctgaacatattgaaaccttagacaacatagggtcaatatcactcaaggctgtcagaaggaagttgcagagcgagacgtttcaagctgctttatggacggtgagccgtcaggccaccaccgtggatgacttatcttttgaggttatgcaacattctctacaatctgcggcagagaaaattggttttgtcagaaatatatatactcgatttcttctcctgccaaattccgtagacgttaccttcgtggctaaggaatccatgattcctgaatgggagaatgaatcgcatcatcgaacaatgtattttatcaatcgtcacagaacgtctatcctagtttctgaaccgccgggatacatttctttcctggatgtcatggcaacagtggtgagcgaggttttaggctttccaacttccctgcctataggatcattattttcatgtcctgaaggatctgaaactgaaattaccgcttacctgagactatgctcttattctcttactaacaccggcacagctgatagttctgttggccaagagataatgccacaagatgctgtacaagtacagcttcaccctctgagaccattctacaaaggggagatcgttgcttggaaaatcaaacaaggagacaagctaagatatggaagagtcccagaagatgttagaccttctgctggccaagccctttacagattaaaggttgaaatgacacctggagagactggtttattactttcatctcaggttttctccttccgaggcacttcaatcgaaaatgaaggtccctcgactttgccggaggtgctccccgcagtatctgataaaaaatctcaagaaatttcagaaagttccagaactaacaaaacaagttctagccagcctgtgaatgaaatgcagcttggtcgagtcacagcgaaagaattggttgaggcagtgcacgagatgctctctgcagcgggaatcaacatggaactggagaatcaatctctactacaaagaacattaacacttcaagaagaactcaaagactctaaagtcgcattcttacttgagcaggagagagcagaggcttccatgaaggaagcagagacggcgaaatcacaatggctgtgtcagatatgtcagacgaaggaggtggaagttactattgtaccatgcggacatgtcttgtgtcggcattgttcaacatcagtctctagatgtcccttttgtcgtcttcaagtcaatagaaccatccgaatcttccgaccgtaa

SEQ ID NO: 2735 - DNA, 1137 bp, Arabidopsis thaliana
  Clone ID: AT_MHF15.C1.o6.tg
atggaaccattcgttgttaaggagaacatcgtcgcatccgcttcttcgccgatgaagaagcgacggatcgatcacactgagtcagctgatggttctgcgattaacgcttctaactctagtagcatcggtggtaacgatacggtgatgaacatggcggagtttggtaacgacaactccaacaatcaggagtctcaacaagtttgcactttcttcaagaagccaacgaaaagtaaaaacataaggaaaagaaccattgacgctgatgaagaagacggagattcgaaaagcgaaagctctattttacaaaatctaaagaaagttgcaaaacccgatagcaacttgtacttttcttctggaccatctactagaacgagtggagctcctgagagacccgtttttcactacgattcatccaaggaaatccaggttcagaacgacagtggagcaacagcgacccttgaaactgaaaccgacttcaatcaagacgctcgagctatccgtgaaagagttcttaaaaaagcagaccatgcattgaaggggaataagaaaaaggcttcagatgagaagctgtacaaaggaattcatggatatacagatcacaaagctgggtttagaagagaacaaacaatctcgagcgagaaagctggaggctcacacgggcctttaagagcttctgctcacatcagagtatcggctagattcgattaccagccagacatttgcaaggattacaaggaaaccggatactgtggatatggagattcgtgtaagttcttgcatgaccgtggggattacaagccgggatggcagatagagaaagagtgggaagaggcagagaaagttaggaagagaaataaagctatgggagttgaggatgacgatgatgaggctgacaaggatagcgacgaagacgaaaatgcattgccctttgcttgcttcatttgcagggagccttttcttgatccagttgtcaccaaatgcaagcattacttctgtgagcattgtgctttaaagcatcacacgaagaacaagaaatgctttgtgtgtaaccaaccaacaatggggattttcaatgcagcacatgagatcaagaagagaatggctgaagaacggagtaaagctgaacaaggattgtga

SEQ ID NO: 2736 - DNA, 438 bp, Arabidopsis thaliana
  Clone ID: AT_F8N16.C1.o21.tg
atggcatcaagttgttgtggggattacgtggcggcggcgtcaccggagatgtcgacagtgatgggatcagaatcaatcgtgttgagacttctttgcgtcgtctttattatcctcttctacggttctattattctcctctgtttcgtaatgtacccgaagctaccaaaggaagaaatcggcgatgaggaagccggagagccattacctcccgccgtgagactcacgaaatgcggcggtggagacggcggagacggtgacggagttaaagctgacgtgtgtgtgatttgtttggaggattttaaagtaaacgacgtcgttagagttcttgtgagatgcaagcacgtgtttcacgtggattgtatagattcgtggtgtttttataagctgacgtgtccgatttgtagagctccgtttcaatggtttggtggtgattggtag

SEQ ID NO: 2737 - DNA, 1275 bp, Arabidopsis thaliana
  Clone ID: AT_F17M19.C1.o13.tg
atgaggaataacatcactctctcttttgatgacatcgaagctaacttcgctccgtcagtgaagggtacaggtgaaattggagtggtttatgtggctgagcctcttgacgcttgtcaaaatcttatgaataaaccagaacagagctccaatgaaacttctccttttgtgttgattgttagaggaggctgtagttttgaagagaaagttagaaaagctcagagagctggtttcaaagctgctattatctatgacaatgaagaccgtggaacattgatagcaatggcaggtaactctggaggtataaggattcatgcggtctttgttacgaaagaaacgggagaagttttaaaggagtatgcgggtttccccgatacgaaagtttggttgatcccaagttttgagaactcggcgtggtctattatggcggtttcgtttatctcgctgcttgcaatgtcggctgttctcgctacttgtttctttgtgcgtaggcatcgaataagaaggcggacatctcggtcctctcgagtgcgtgagtttcacggtatgagccgccgcttggtgaaagcaatgccgagtcttatattcagttcgtttcatgaagataacactactgcattcacttgtgctatttgccttgaagactacactgttggagacaagctcaggctcttaccttgctgtcacaagtttcatgctgcgtgtgttgactcatggttaacctcttggagaactttctgtccggtgtgcaaacgagatgcaagaacgagcacgggagagcctccagcttcagagagcacgccattgctctcatctgctgcatcgtctttcacttcttcctctctgcactcttcagtcagatcatctgcactattgattggtccttccttgggctcattaccaacttcaatctctttctctcccgcatacgcaagctcatcctatattagacaatcattccagtcttcctctaaccgtcgatcacctccaataagcgtaagtcgaagctcagtggatctcagacaacaagcagcttctccatctccatcaccatcacagagatcatacatttcccatatggcttctccacagtcactaggttacccaactatctcccctttcaacacgaggtacatgtcaccgtatagacctagcccgagcaatgcatcacctgcaatggctggatcatcgaattatccgttgaatccactgcgttacagtgaatcagctggaactttctctccatacgcctctgcaaactcgcttccagactgttag

SEQ ID NO: 2738 - DNA, 984 bp, Arabidopsis thaliana
  Clone ID: AT_T9I1.C1.o10.tg
atgacaatcgggaagagtccgatcttgctacatcatcatgttatcttcctattgttgcttgttctccaagtcagtggccagcatcagcctagaaccactgctccaccgtatattgcccaaagaccaaatcaagtacccgcagtaatcattgcgatgcttatgttcacgctcttattcagcatgttggcttgttgtgtttgttataaatacacaaacacatctcctcatggaaccagctctgataccgaagagggaggtcatggagaagtagcgtttacaaggagaacaagccgtggacttggaaaggatgtgataaattcgtttccttcctttctttactcacaagttaaagggctaaagataggcaaaggcggtgtggaatgtgcgatctgcctgaatgagtttgaggacgaggaaacgctgcgtttaatgcctccttgtagccatgcatttcatgctagttgcattgatgtctggctgtcttctcggtccacatgtccagtttgccgtgcaagtctccctcccaaaccaggcagcgatcaaaactctttgtatccatttatacgcccacatgataatcaagatatggatcttgaaaatgtaaccgcgcgaagaagtgtattggagtctccagatgtacgtttgctagatagattgtcatggagcaataacaccggggcaaatacaccgcctcgatcgaggtctacagggttatcaaactggagaataacggagcttttgttcccaagatcccattcgactggacattctctagtaccacgtgtagaaaaccttgacagattcacattgcagttaccggaagaagtacgaaggcaactgagccacatgaagacgttaccacaagctaggagttcaagagaaggctataggagtggtagcgttggaagcgagagaagaggaaaaggcaaggaaaaagagtttggtgaagggtcatttgatcgccttaaggcagagatggtctaa

SEQ ID NO: 2739 - DNA, 456 bp, Arabidopsis thaliana
  Clone ID: AT_K18J17.C1.o6.tg
atgcgatcttttccgccgtcaccagctcccgcatctatcgaaaacaatacgcatcatcatctacatgaagacttcactcttatggtcatcgtcttcgttttgtatggcattgttgccataaggtatgcaacctttaacgatggttgtcgtggaactaatcttagattccagagaccgcaaccacctctaccgttaccacaacctcagccgccaatgtgtccgcgggagattgcggcgatgattaaagacatagttgtggacgtggaattatgttgtccgatatgtcttgaggatttgaagaaggttgataatgatgatgataaagtcgtggtttgtttatccaagtgcaatcatagtttccacatgaattgcatattctcttggcttagagaaagtcaggattgtcccatctgtcgtagcactgtttacagaggtggagttacattgatcaaataa

SEQ ID NO: 2740 - DNA, 978 bp, Arabidopsis thaliana
  Clone ID: AT_F6A14.C1.o12.tg
atgaatgaattacttcaagagaaccctaaacggctaaacataatcgataaaatttatttattcttgatcgttctcgccatcatgatttcatccttcgcacatgaaattgagcacaatcctgtacctgaagatgttggcataatcaatatcagtgttgctacgaccaaaatatatcaaagtatcatcagtaattatgatctctatgatgaactaacatcagaattctcttgtatcccggtttctttacgcgactgtgttgctgtagagcttactgaattcttgacgggatcaggaaaaatcactcccatcgatgcttaccatgtgttactagagttgtttcgattcgtcgatgaaataacttcctctgatgattatactccaggttgtgctttaagagtgttgatgactcttacaatcgctattcctcctgaacatattgaagaagacgttctaggtttagaggatgagcaagacgtttacggagaagcatcttcatctcagtttgaagaagttgttccattctacgggttgccatacttcagggatgactacaatgattactttccttacgaagaagcatcttcatctcagcttggagaagttgttctattccacgggttgccacacttaagggatgagcaccatgctagctttggcttcgatcatcaaattgaagaagcgtctcattctcagattgaagaagtttttcaagtttcgttcaatgagaccaacactgtcaggttaaaacctgcgagcaagctcactgtcggggctttgaataggaaaacatacaagaaagctagtggtgttgtatgtgagaatgacgtgtgcactatttgtttggaagagtttgacgatggaagaagtattgtgactttaccgtgtgggcacgagtttgacgaggagtgtgttttagagtggtttgtgagaagtcatgtatgtccattgtgtcgtctcgagttgccatgtgaaagataa

SEQ ID NO: 2741 - DNA, 1107 bp, Arabidopsis thaliana
  Clone ID: AT_T12C24.C1.o17.tg
atgtcaacggagactaccacgggaaattcctcgttaattccagcatcatcatcatcgtcatcctccgacgcaatcgatccagctccgttgctttttaacggcgacgataatgaaggaaacaacggaggaggaggtggggaacggagatctgtcaggagacaagggttgagagaagctgcgaggtttcttagtcgtgctagtagcggacgcgtgatgcgtgagccatctatgcttgtgagagaagccgcggcggagcagctcgaggagaggcagagcgattgggcttattcgaagcctgtggtggtgcttgatatcgtttggaatctggcttttgtttctgttgctacggctattttggtgatgagcaggaaagaacatccgattatgccgcttagagtttggcttttggggtatgctttgcaatgcgtgttgcatatggtttgtgtctgtgttgagtatcggaggaggaacaggaggagaaccaataggacgacgacgacgactcctccacggtcacgttcttcttcttcctcttcatcttcttcttccttggaggaagaagctttgggttccaggaggaattcaggtgtgcaggacttgtcgcttggccacttggataccgaaagcagcaggctgtctattgtctttcttggtttcgatgtgttctttgttgtcttctgtgttgcgttggcctgcgttattggaattgcggtttgctgttgcctgccatgcatcattgcagttttgtacgctgttgctgatcaggaaggggcttcaaaagaagacattgagcagctcaccaaattcaagtttcgcaaactaggtgatgccaacaaacacactaatgatgaagcccaaggaactaccgagggaataatgactgagtgtggtacagattcacccattgaacatactcttttgcaagaagatgcagaatgttgcatctgtctctctgcatatgaagacggaacagagctaagggaactaccttgtggacaccatttccactgttcatgcgtagacaaatggctatacatcaacgcgacttgcccactctgcaaatacaacatcctcaagagtagcaacttggatcgagaggaagtctag

SEQ ID NO: 2742 - DNA, 681 bp, Arabidopsis thaliana
  Clone ID: AT_MYC6.C1.o6.tg
atgggaggttgctgttgttgttcttcttcacgaagagctgatgtagataatggacctgcgtactactactacccaagggcaacagaagagcgtgtgcctttatcttccgctcataacaggacttcctctgcaatctctactggtgttgtagtagtagacacaaacttagagacatcatctcctgatgcttatataccaccgccactgcctacccctttcgatgtgcctatagggattcctcaaacaccagctagtggtgaagaggctacttgtgttgatataagagaggtttcggtggactctgctaataccgagtctgctcaagaaacagttgatggtattactctcggggttccaactacatgctcacataaagagacagatagcaaaatccaaacagagattgatcttgaatctactgaagaaatagacccgaagctatcaaaagctgtttttataccaatagaggaagaggaggattgtcccatatgtttggaagaatatgatatcgagaacccgaaacttgtagccaaatgtgatcaccattttcaccttgcatgcattctagaatggatggagagaagtgaaacctgccccgtctgcaacaaggctcaattctctctgtatcagaagaaagaaattggagaacaagagaaaaacttaaaaagaaaaaatgggtaa

SEQ ID NO: 2743 - DNA, 729 bp, Arabidopsis thaliana
  Clone ID: AT_F7A7.C1.o40.tg
atgcgaaaatcgttcaaggattcactcaaggctcttgaagctgatatccagttcgccaacactctggcgtcagagtacccagaggagtatgatggtggctacgttcagatgagattatcttacagcccggcggctcatctctttctcttccttcttcagtggactgattgtcatttcgctggcgctttgggcttgcttaggatccttatttataaggcatatgttgatgggaagaccacaatgtcgctacatgaacgcaaaactagtatcagagaattctatgatgtgttgtttccttcgctattgcaacttcatggagggatcaccgatgtagaagaaaggaaacagaaggagatatgcgacaaaagataccgtaaaaaggacagaacagataaaggaaagatgtcggagatcgatttggagagggaagaagagtgtggaatctgcttggagattcgaaacaaagttgttcttcctacgtgcaatcactccatgtgtataaactgctacagaaactggcgtgcacggtcacagtcgtgcccgttctgtcgaggcagcttgaaaagagtgaattctggtgatctatggatatacacttgtagcgccgagattgcagatttaccagcgatttacaaggagaatctgaagaggttgttgatatacattgacaagttgcctctcgttacttctgatccaaatcttgtcccttatgctcctcttcctcggtga

SEQ ID NO: 2744 - DNA, 819 bp, Arabidopsis thaliana
  Clone ID: AT_K21H1.C1.o8.tg
atggatccaaacgaagacaattctgagataccggatagtccttttagcttcatgtggctactatttggagacgactgggatctatgggacacttactcaccagttgatgctgatgacatctcaccagatccaacgcttgatgtgaacggtgatggtccggcaatagagcccggttcccttctgaggacaattagttgggaaacaacgttcgagcaggactcgttacaatcatggaacgatgaacaatctgaaacaacatcagtagtagagtatacagatgtatcttctcatggaaacaccttcactaacgaggaagaaacgttggagcgttactggagaaactggttacagtcatcgaccaatgaacaatctgaaacaggatcacaagaagagtatacaaatgcatcttctcatggaggcaccttcatttacgaggaagaaacgttggagcagtattggagaaactggttacagtcatcgacaaatgaacaatttgaaacagagtcactagaagagtatacaaatccatcttctcatggagacatcttcacttacgaggaattattgagcatcactgacgaaacaggagatgaacgcactggtttaagcgaggaagtgattgatgagaatctaataagaaggaaatatgaaaagcgtagcgacgatgaaacgaagagatgtgtgatctgtcagcagaaattgaaggacaatgaagaagtttcgaaactgggatgtgggcatgactttcacttcggatgcatcaagaattggctaatggtcacgaacaagtgtcctctttgcaaccgagaagtcgtttaa

SEQ ID NO: 2745 - DNA, 909 bp, Arabidopsis thaliana
  Clone ID: AT_F23J3.C1.o140.tg
atgactatattcgcgagagatctcatctataggatcgaaacgaaggttttgttgccgctcttccttgtccatttgttaccttatgtaacatgccagcaagagtcagaatccgtagaccgcaatagaaaaaccaatttcccaacggaaacggtaatcgcaatcattgtgcttgcaatatttatctcattaagcatggtcgcttgtttcttgcacaaaacattctatagagcagaggttgaggcggcaagccaagaagtgtttcacagtagagcgaggcgtgggctcgagaaggaactcgttgagtcctttccaattttcctctattcggaggttaaagggctcaagataggcaaaggcggagtagaatgtgcaatttgtctaagcgagtttgtggataaagaaacactacgttggatgcctccttgtagccacactttccatgctaattgcattgatgtgtggctctcttctcagtccacatgtccggcttgtcgtgcaaatctgtctctcaaacccggtgagagttatccatatccgatcacggatcttgaaacgggaaatgaacaaagagatgaacattcattgcttcaactaggtacgaatctagatcgattcacacttcagttaccagaggagatgcaaagacaattggttagcttgaatctgataaggacaagcaacatgaccttacctcgagccatgagttcgagacagggctacagaagcggtttctctcatggacgacaaacacttcggcgggccatatctatgtctctaagtttctctttacaagctgcttctgttcgttccacagttggcagagacgatctagtgctagagacttcccaagctaaggacaaagatttatgtgaacagtcgttccaacacctcatgccagagaaggtctaa

SEQ ID NO: 2746 - DNA, 675 bp, Arabidopsis thaliana
  Clone ID: AT_F6A14.C1.o13.tg
atgagaatagatttctaccacaatatcatacgcaatcatcaaccagaaaacgctggcacactctcagtgaatgcaaatatcgacggttacgactacacatttactgatacatcgtttatcgaagaattcctcaacgaagaaaacaatcagtttcccaccaaacaaaaattacattatttcttggaggattcagagctaattaacgattacgatatggaatggggtactgcgatatttgagctaattttctatgttgttgcagtaactaatcccgcaagaggtgactattctccgggggatgatttgcttgtgtccttgcttatttttcctaatgatgaaccgatcgaagaagagtatgagattgaagaagaggatttgagtgaagaagaggatcaaattgaagaagcggttcgagcctccttggaggagaccaataatatcagtttgagacccgcaaacaagctcgtggtcaattctttagccaggaaaatatacaagaagaccactagttctactgaaaggtgcacaatttgtttggaagagtttaacgatggaacaaaagttatgactttaccttgcggacatgaatttgacgatgagtgtgtcctaacgtggtttgagactaatcatgactgtccactgtgtcgtttcaagttgccatgtgaagatcaatga

SEQ ID NO: 2747 - DNA, 2163 bp, Arabidopsis thaliana
  Clone ID: AT_F20D10.C1.o10.tg
atgatgaatggtttgagaagaacgttttggagttcgattcataaaaagaaagacaacaacagagtcgatgattcacttgatcgacaaaaaccaacaacaacttcaagattcgggtttttctctaacccgtctactccaaggtctgagacccgacccgattctgtaacctgctctcctaccattccttgtcagagttggtctgctacagctatctccactccttcaccgtctcttcccgctagtcccaagcttcaatgcgatacttccggggacgttactccgacgagaaacagaagtcctctctctttcctcagcgtttcttcttcttcttctacaccttcctcacctaaatctccggcgagcttttctctactcaaatcaaaactctgtttcaccaaagtaagaatcctaaatcgaaacaaccaaagtagcatcagtagtagcaaatgtggaatttgtttacaaagcgcgaaagctggaagaggaacggcgattttcacggcggaatgttcacatacgtttcatttcccttgcgtagcttcacgcgccggtgatcggaatctactctccgattgtcctgtttgtggtgcttcatggagagaaacttcgcttcttcctctgtctctctcttcttctctccacgaatctggatccgaatccgattccaagatccgagaatcaaagaacaataacaaatcgttaagagtttacaacgacgacgagcctttgatttcatctccaatctctcgtaccggtttcaacactataccggaatcaaacgaagacgaagaagaagaagataacgatgacggagaatttaaagggttttacgttaacacgccgtcaccgttaacgacgaagaaaatgttaacggattccgttactggacacgtggacgttaagctgtcttcagaagctgcaattgtggcggttgggagaggtaacgagacgtactcggtgctcatgaaaatcaaatctccgtcgttaccgacggcgcgtagatctccggtggatcttgtaacggttattgacgttagcggagggaatattgagatggtgaagcgagcgatgaggcaagttatatcgtctctacgagaaacggatcgtttatcgatggtctcgttctcgtcgagctcgaagcgattgacgccgttacggagaatgacggcgaacggaaggcgattagctagaagaatcgtcgacgatatttccggtgatggcgacggaatgagtgttaatgatgccgttaagaaagcggctaaagtgatcgaagatcgccggcagaaaaatctcttcaccaccatcttcgtgttaacggaccgtaatagaaactcggcccaccaagcccaattagcccaaccggattttgtgacttccacgcgcttctctcatttggaaatcccaacgcacactatttggcttggcgcgtgtaatcacgctctccccgaggacgtgtttgccaaacgtatcaagagtctgttgagtttatcggttcaagatcttactctaaatctcggattagtttccgggtcgggtcaaggaaaggtgacatcagtttattcactctcgggtcgacccgtttggctcggatccgggttgattcggttgggtgacatgtacggcgatgaagaaagagaagtgttggtggaactcaaatcaccttcgtctagtagatcccagagaatcatgaccgtccgatcacgccacgtggatcctacgactcaggaaatcaaaaactatgaagatcgcgcgctaatgataccacgtcccacgaccgttagatcatctgacccgagcatcgcaaggctacgaaacctccacgtcagcacacgagccgttgccgagtctcggcggttagtggaagtcaatgattactcgggggctgagcgaatgctgacatcagctagagccttgttggtgcaatacggtttgagctcaagtgattcgtgcttacgtggtttggaagctgagctggcagatttgaaccgtttgagaggtagacacgtggcggtgaagagtccagagccggtggttcagaagagtgagccgcttacaccgacttcagcgtggagagcggctgagagattggctaaagtggcgatcatgaggaagcatatgaatagagtcagcgacctccatggattcgaaaatgctagattttag

SEQ ID NO: 2748 - DNA, 810 bp, Arabidopsis thaliana
  Clone ID: AT_F4B14.C1.o110.tg
atggcctcttctagattccaatctgggttttgtcctatctcttcgtgtccctctcttgagaatttcatcgaaaggattaaagacgcatgtcgtttcaccctctccgctgttctagggacaattctctcggcggtcttgactttcttcttcgctttagagctaagaaagttgtttccttcttcagtgggcacattgcttggagcacttactggagctttgataggccaagaaaccgaaagtgggtttatccgaggagcggcggttggagccatttcgggagctgttttctctatcgaaattgatgtcattgttagtctgataagtggtagacttgtgcgggaacgaataggtccagcaatgctaagtgcggttcaaacaatgagatctcctctaatcatattcatctctcttctcactgatcagatgggagctgtggattcaactttcgaagagctctcgagtattttcgataccggtggctcaaaggggttaacaggagatttggttgataaaatacctaaaatcaaaatcactggcaaaaacaacttagatgcttctggcaacaaagactcatgttctgtttgtcttcaggttttttgctcatttcagctcaaacgaaatcttaattccccaaatgcagaaccaaaaggtttagttcttgatcttcttttgtgtaactttttgcaggattttcaacttggtgaaacggtgagaagcttgccacattgtcatcacatgtttcacttgccttgcatagacaattggctcttcaggcacggatcttgtccaatgtgtagacgcgatctgtaa

SEQ ID NO: 2749 - DNA, 900 bp, Arabidopsis thaliana
  Clone ID: AT_F4P12.C1.o110.tg
atgggcaatgtcataagcggtggaagccgcccggaaaatcatcgggaccgtacttcgccgccgtatccaaaccctaatgctcagtaccaaggcaattatccgtcgccgtaccaagattgtgctaggtatccgtatggagagatggcgtctccagtgcaatacgtagagcatcaggaagcagtgactataaggaacgacatcaatctgaagaaagaaactttgagacttgagcctgatgaacagaaccctggcaagtttttgctctccttcacttttgacgcctctgttcctggaagcatcactgtaatgttctttgctaaagaaggcaaagactgtaaccttattgcgacaaaggaggatctttttccatccactcaagttagttttgcaaaaggtctggaacagagattcaagcaggcttgtgggacagggattgatttctcagatatgtcagaggcagatttggttgaggcaaacgagacagatgtgtatcatgtggcagtgaaagcagaggtagtatcagaagatgatcatcctgagtctgggacaccaaacagacagataactcatgtggttttagagaaagatcataagggtgagtacaaggcgagagtggtgaagcagatcctgtgggtgaatgggaataggtatgttcttcaagagatttatgggattggtaatacagttgatgataatggagaagatgcgaatgaaagaggaaaagaatgcgtcatctgcttatctgagccacgggataccactgttctcccttgcaggcacatgtgtatgtgtagcggttgtgcaaagcttttgaggtttcagacaaacctctgccccatctgtagacaaccggtggataggcttttggagataacagtgaacaacaacgacaggaactag

SEQ ID NO: 2750 - DNA, 1383 bp, Arabidopsis thaliana
  Clone ID: AT_F22D1.C1.o50.tg
atgagcttcttcatcgaagattctggtctcatagtcactcagcttctctacaaaatggctgttctcatcaccgtcttgagatggatcctcgcttggatcttacgctaccgatccagatccagatccacctcttcttccacttccgcctgtccttcgatttcctcacaggcgatcaaagaaagcctctccgtgacgacgttccgtgacgcagctgagagatctccggcgatgatcaacgacacctgcgctgtgtgtctcggagatctggaagatggagatgaggttagagaactcaggaactgtagccatatgtttcaccgtgagtgtattgaccggtggttggattatgaatgttgcggtggtgatgagaataacgaaggtgaggaggataatcaccgtacgtgtcctctttgtagaactccgctacttgctgctaatacgacgtcgtgtggtgattggccgacgaagaacgaacctagctgggccgttgaacggcttctctacctcttcggagatgatcttcacgagaagtttgttcgttcgttgctatcaaattcatcttcaatggcagcgatacagattctagatcaggtcgacgattccgcagattcactgatagaatcgatgcgtggagttcaaaatacgatggctttacttcactcgacggttggtgagttactcaattccatgtccgagactctaaattccatggcggagatgaaatcagcacttcttcaacaacccacagctacagcaacgtcggaatctactaaagttacggtggatcatgacctccctgtagcaccaccacctcctacgaaacaatcgaccgcggcggaggataactcaatcgacacgcacccgcaccgtatgtctcgctacattcagctgatgaagcccaagatcgagatgccagtcttcgaaggtcccaatgttaactcatggctcaccagagcagaacgatacttcgagtttggaagtttcacagacgcggagaagattcaattagtttacatgagtgtcgaaggccgtgctttgtgttggtttaaccttgagaaccgtaacccttttgttgattggaatgatttcaaagctagggttttacagaggtttggtgatcctagatctgcaatggaacgtttgctcactctcaaacaggttgattctgttatatcatatcttggtgaatttgaggatctctcgacgcagtgtttggatgaccttgatactgtacttgaggttgtattcgtcaaagggcttaaggaggagattcaggaaatgcttcgtgtgtttcaaccaaagggtttgagtgatatcatcatgatggctcgtagattggagaatagtcctttttgccgtctgatcaaaaattcacaagtttga

SEQ ID NO: 2751 - DNA, 642 bp, Arabidopsis thaliana
  Clone ID: AT_F15J5.C1.o80.tg
atggagggcacatcaacatggattctaaactatgaatctaagactcacatcgtcgatcacaaaaattcaggatccttctcaataagtatccaaggaattgagcggattcttatccggagtcctagcggtcgtgaaactttggctcaacaaaaatcgctaggaaagaagaatgcaacagtaagaatcgcatccgagatcccacctgttttcctcaccggagaagaaatatgcagtatatttgtggctaacgtgttgtccaagtcaaagatcaacaagtggattcagcaaagtattgttcctaaaatctgcgaagacctgattgatataagacgccaccttgaagaagaagaaaaagatggtttcttggttgaagttgaagttgttctagaaacgttgtatagtgattggttaagagtcaatgattatgactctcaaggttgtctaataccaatagaagaagagtgcataatatgtctagaagagttagcatcatcaggtagtgagaggaggatcatgaagttgctttgttctcacagttttcataaagattgtattctcccctggctacgctgcaagcgatcatgtcctacttgtcgtgacgacatccacaatcgtcgagcagaagaagaccaccatgaatga

SEQ ID NO: 2752 - DNA, 702 bp, Arabidopsis thaliana
  Clone ID: AT_T24M8.C1.o4.tg
atgacgttagagagttacgccggcgatgttcacacggtaccacaatcggagaactcgatggaggagagaggcggcggtgagcttttcgtgccacctcttaacttcgctatggtcgataatggaattttccgttctggttttcctgaacccgtcagtttcagctttctccagtctttgcgtctcaaatccatcatatatttgtgtcctgaggcatatccagaggtgaatagagagtttgcaaaatcaaatgggatccaagtttttcaatttggaattgaaagatgcaaggtgagattggtggaaccatttgttaatatccctgacgaggtaatccgagaagccttacaacatcggacgggatgtcttgtaggttgtgtgaggaagattcaaagatggtgtttgtcttctatcttcgacgagtaccaaagattcgcagctgcgaaagctagaatctcagaccagagattcatggagctctttgacatctccaatctaaagcatacaccactttccttctcatgctccaagagaggagttaataatgattcggtgtgttgcgtgtgcatgggaaggaagaaaggagcagcgtttatcccatgtggacatactttttgcagagtgtgttctcgagaggtgtggcttaatcgaggatcgtgtcctctttgtaaccgtccgatcatcgagatcctcgacatttattga

SEQ ID NO: 2753 - DNA, 933 bp, Arabidopsis thaliana
  Clone ID: AT_T27A16.C1.o6.tg
atgcgtggagattcaaagcaagagggagatgaagaaagcaagcttacagtgagctgtgctaatgacgtagaagggattcgcgtaaggaagagaggcgattccagagaagaagaagcaaagggattcaaatccctaaattggaactgggattttcaaaagttgtatcgattcgtcgatgaattaacttcctctgatgattatactccagcttgtgctttaagagtgtcgatgactcttaccaccgttattcctccagaacaaactgaagaagcagctccatctgatcacgctgaagaagttgatcaagtctcgctcaatgaggatctaggtttggaggttgagaacgatgccaactttttctatggagaatcatcttcatctcagcctggccgaggtgttccattctacgagcttccacacttaaggtatgagcacgatgttaacttttcttatggagaagcatcttcgtctcagctgggaggatttgttccatttcacggattgccatacttaggctatgagcaggatcctaacgttttttacggacaatcatctccatatcagcctcaagaagttctattccactggttgccacgctatgagcacgacttcgatcatcaaactgaggaagcgtttcatcctcagtttgaacaagttttgcaagcttcattcaatgagaccaatactgccaggttaaaacctgcgagcaagctcgctgttgagtctttaaataggaaaacatacaagaaggctagtgatgtcgtaggtgagaatgaaatgtgtagtatttgtctagaagagtttgacgacggaagaagcattgtggctctaccatgtggacacgagtttgacgatgagtgtgccctgaagtggtttgagaccaatcacgattgtcctctatgtcgtttcaagttgccatgtgaagatcaatga

SEQ ID NO: 2754 - DNA, 1257 bp, Arabidopsis thaliana
  Clone ID: AT_K15E6.C1.o70.tg
atgacgacggggctagtaacgccgggagatgtaatcgggaaagcgacagagtttaaagctggaaaaggagcttacgtcaacgacgccaccatctacgcttccctcacaggaacttgccggattgtttctcctcttcccgaatcaattgatcagagagctattgtggaagttacaggtcacaaggcacatggtcctattccagagactggttctgttgtcatagcaagagtgactaaagttatgactaagatggctgctgttgatatcttgtgtgttggttcaaaagccgttcgtgaaaattttgctggtgtaattaggcaacaagatgttagagcaacagagattgacaaagttgacatgcatcagtctttccatgctggtgacattgttagagctatgctgtctcttggtgatgcacgggcttactacttgtcaactgctaagaatgaacttggtgtggtctcagctgaaagtgctgcgggcgaaacaatggttccgataagttggacagagatgcagtgccccttgtcgggccaaaccgagcagagaaaagttgccaaggaggaacaagagttttgcaccaagaagagagaggaaggattctggtttacgggagctattgatctctttgagagttatgtgaatccaaacacttccataactaggaactgtccttgccttaattgcttcctccagagtttcatggatttgtatgcttcgttgtttagtagagggggaatgcatccaataccttcaactgtagagacagctacagtgatgaattcaacaactgcacttgatgactctctgtctagtgtatatcattctcctccaacaccattgccttacgatgctgatcctaggtactttcgttttgttaagggctctagtcattcaggtgaagaatcagaaccgttaagaggtgatactgaaatgagttctgaagctttgggtgatggtggagccaagtggagtaagtctgattctgaagatggttcgaaagaagtgtatacgaaaggttcatcaacctttacaaagtcgaaaacaatgccggggatagaagtttattatgcagattcggatgatgaagatatttgtccaacctgccttgatgattacactttggagaatccgaagataatcaccaagtgttctcaccatttccaccttagctgtatttatgaatggatggagagaagtgaaacttgccccgtctgtggaaaggtgatggcatttgatgaaaatgaaacttcttag

SEQ ID NO: 2755 - DNA, 705 bp, Arabidopsis thaliana
  Clone ID: AT_T32F12.C1.o20.tg
atgcctgtcaccgtagttttgaccggtgttcttctctttgtaattttcgccggattcttctctcttttcttatggcagtttcttctgaatcgattatttactacttggaaccttcaacgaacaccttacggtgacctaatccatgtggccactccgcctgaaaatactggcctcgacccgtttatcatccggtcctttcctgtattccactattcatctgcaactaagaaaaatcatgggacggaatgcgctatttgcttgtcagagttttcagatgaagatacagttaggctcataacggtttgtcgtcatccctttcattcaaattgcattgatctttggtttgagttacacaagacttgtcctgtttgccggtgtgagttagatcctggcatgattggatctggaaggcttgaatcattccacaacacagtcacaattactattcaggacataaaccatgatgaggaaaatcctccaaccgctggttcaagcaaaaggctaatagaagcctcggcttggcgattctcgaggtcacattctactggacatttcatggttaagactacggatgctaatgtgaagtccaaaagaaggcattaccaaacaggaagctgtgtctcgttcgacgaacttactcggtatgaaggagcaggatggcaatggcttggtgattcatcacacattagcaggattgaagtatag

SEQ ID NO: 2756 - DNA, 1260 bp, Arabidopsis thaliana
  Clone ID: AT_T5C23.C1.o110.tg
atgtcatcatcatcatcaacgacgacgaacacaacaacagaatcagattcatcatctctacctactcacatcggtagatcaaattccgacggaatcatcgacactacaccatttcttcctcccaccgttacaagaaccataagcgtagatgaagaatccaatccaattcatcgatccgctagacgacaaggtctaagagaagcagcgaggttcctccgtcacgctggtagccggagaatgatgcgtgaaccatcgatgctcgttagagaaaccgctgctgagcaattagaagagagacaaagtgattgggcgtattctaaacctgtggtgtttcttgacattttgtggaatcttgcttttgttgccatcggtgttgctgttctgatacttagccgtgacgagaagcctaatatgccgttgagagtttgggttgttggttatgggattcaatgttggttacatatggcttgtgtttgtgttgagtataggcggaggagacgacgacgtcacccggaggatggtggtggttctgggttgacgaattcttcgtcgcagcaatatgtttcgttagcgcaattggaggatagaggagagactagtaatcctgcgaagcatcttgaatcagccaatacgatgttctcattcatctggtggataattggattctactgggtttctgcaggaggccaaacactatctagtgactctcctcagctctattggctgtgtatcatttttctcggtttcgatgttttctttgttgtgttctgtgttgcattggcttgtgttatcggccttgctgtttgctgttgtcttccatgtataattgcaattctatatgctgttgccgaccaggagggagcatcgaagaacgacatagatcaaatgccgaaattcagatttacaaaaactggcaatgttgaaaagctctcaggcaaagcacggggaataatgacggaatgtggaacagattcacctattgaacgctcgctctctccagaagacgcggtacaatcccatttccacattcttatcaagttgtacattttgaaagtgtgtaaaattgataacgcatggcttcttatgattctgcaggaatgctgcatctgtctctgtgaatatgaagatggagttgaacttagagaactcccttgtaaccatcactttcattgcacttgcatcgataaatggcttcatataaactcacgttgcccgctctgcaagtttaacatcttgaagaacgcaaacaacgaagtctag

SEQ ID NO: 2757 - DNA, 984 bp, Arabidopsis thaliana
  Clone ID: AT_T13D8.C1.o23.tg
atgtcattgagtcagccaataacacggaccgatagtgcacccaatggagcatttaggacttttggtctctactggtgctaccattgtgatcgtatggtcagaattgcatcctctaacccatcagagatcgcctgtcctcgatgtttgaggcaatttgtcgttgagattgaaacgagacaacggcctcggtttactttcaaccatgctactccgccttttgatgcttctcctgaggctcgtcttctcgaagctctctcgctcatgtttgagcctgcaaccataggtaggtttggtgcagacccatttcttagggcaagatccagaaacatcttggaacctgaatcaagaccccgaccgcaacatcgaagacgacacagccttgacaatgttaacaatggtggtttacctctaccaagaagaacatatgttattctccggcccaataatccgactagtccactcggaaacataattgcgccaccaaatcaagcaccaccacggcatgtgaactcacatgattactttactggagcatcaagcttagagcagctgattgaacaactaacacaagacgataggcctggaccaccacctgcgtcagaacccaccattaattccctaccatctgtgaaaataacaccacaacatctaactaacgacatgtcccaatgcacagtgtgcatggaagaattcattgttggtggggacgcaacggaattaccatgtaaacatatttaccataaagattgtatagtcccgtggcttaggcttaacaattcttgccctatctgccgccgtgacctgccacttgtcaacaccgttgctgaatctcgagaaaggagcaatcctattagacaagacatgcctgaaagaaggcgtccaaggtggatgcaactcggtaacatttggccatttagagcaagataccaaagggttagtccagaagaaacagcaaaccagaatcctcgagataacaggagctaa

SEQ ID NO: 2758 - DNA, 963 bp, Arabidopsis thaliana
  Clone ID: AT_MRG7.C1.o22.tg
atgagtgatgagagtcccgcttttgcattgcactcgggcagcagtagacaaagaaaaagtttggaattcagatttcagcagtcgccaagatgggctccatactcatctgcttctgatgggaacgaacagaaaacctccttggttaataatagtctaacaagaccaaatagctcaaatcctcaatgcttaaacgaggagaacggttttgatagagacagtaccgccatctcaacgagtttcagatcgttgctgtctctttcagagtcatctgtcccatgggagactccgaccaacaatcagtcttccagccttactcactgctcttaccctcgagtcttctgcaacccggtttcagtttgtgagaatcctgaacctgatcatacgcaagaagactcgtccacaaatcctggttccagtatcatgatgtccacaagaaaccaccaaggctcaccagtagaggaagaagtatcaccaaactcgagcagcaatgacatgttgctagatgttgaaagatccaatgacacagaagtcgcaaacccgagatctgaacaaggttcaatgacacatcaaagatgcgggatttgcaagaagcttttatctcagaaatctccatggagctcatacaagatattgagatccagagacatgccagccactggtgttttcccctgccatcacgtctaccatgttgagtgtttagacaaagcaaccccaacagctcaaaccagagacccgtcttgtcctgtttgctcaaacaccattggagtaatggaacagccactgatagcacctgaaacattgcaaatggctctaagatctctcagaagaagccgcacagctctagaattagagacagtaagagtcccttccaatgacaatcaaagaagacacaataccagaagaagccataaatgggacaaactcagctgctgtttgaatataagcttctcatcttcttcctag

SEQ ID NO: 2759 - DNA, 645 bp, Arabidopsis thaliana
  Clone ID: AT_T3F17.C1.o19.tg
atgtcaacactcgcctcctccgcctccgtcttcctagtccaccctccccttccaccgtcgccaccacaagcaggcaaccactcttacctcacaactctaggctttggctactccatagccatagctctcggttttctcgtccttctctcgaccgtccttttatcctcatacatctgttgccgtgactctcgccgccgcacaaccgccgtggaatccacaggcgatcgtggcggaagtgtaatcctcccccgcataatctttgtcgccgaggaagacaatgaagatctcgaagcaggtgatgtcgtggtgggacttgatcaagccgtcatcaactcataccctaagttccacttttccaaagatacctccgccgcgtcctcagatggctttggtggcggaggagacacaacgtgctcgatctgtttatgtgagtataaagaagcggagatgctgaggatgatgccggagtgtaaacactacttccatttgtgttgccttgatgcgtggcttaaactcaacggatcttgtcccgtttgtcggaactcgccgcttccaacgccgacttcaacgcctctgtcaacgcctttgtcagaagttgtgcctctctcccagtacgcggccgatcggaggagagcaagaagatga

SEQ ID NO: 2760 - DNA, 615 bp, Arabidopsis thaliana
  Clone ID: AT_T26F17.C1.o12.tg
atggaagcggaaatatcctttggcggcgaaatagacctcaaaccgaaatcacaagatgctggatcattcaaaatctgcgtaagtgcccgaagatcggacacatcaattagtcttccaccaaatttcgttctctcgtacaatgactacgaaggtgtcatatcctcctaccctaatgactcgaaaaaactgaatgattggttgtactcagcagggctctccgaacaatatgttgacattgctaactctcaactcactgaacgaatctgtaagtcgatttctatggtagactcttcagtttgtgctactttagtttacatgtactgtaaagtcattgttccacctcggattgactcgtttgatgagaccaccaataatatcgagttgattagaccggcaaataagcttgtggttgaccgtttggcaaggaaagtatataataagaagaagaaatccaactctgacgcgagcgtgtgcacaatttgtttggaggagtttgaaaagggagaaatagtggtgaccttaccatgtggccacgagtttgacgatggatgtattgggaagtggtttttgaaagaccatgtttgtccattgtgccgtttcgagttgccttgttaa

SEQ ID NO: 2761 - DNA, 858 bp, Arabidopsis thaliana
  Clone ID: AT_F7K24.C1.o180.tg
atgagttccgttaccgagatcgtgtctgagcagcaagtgatcgacggtattcaggatttggcccttcaaaatcagttggagctgattctgtccatgatgcttctgcttctatgtggaaatgtttacaatgtgaagttgactgttgctgaatttgctactgatattgacaaaaagaagatccaggaagagatccatgagccgagtttcgggaatcatggtggctgttgtgcaatatgtttgagtgaaattcctcttcaagaaactgctatggtcaaaggctgtgaacacacttactgtgtgacatgcatacttcgttgggcgagttgcaaagagagtcccacatgcccacaatgtaagcatccatttgattttctcagtgtccaccgagcacttgatggcagcattgaagattttctgtttgaggagagtgtgtgccttctccttagagcctcatggtttgtaccattggatgtggtggaacaggcgtcgtacagccatggttaccatgatgattttgacattccttatgactacgaggatgaagatgatgaccttgacgagttttatctgcacggctcaagtcttcgcataggaaatcggagatggggtggcaatggttttgtcagatccgggcgtcaagaagccaggcctgtccagagatacagtggttctggttctagttccagttccagctctgggtcatcctcaagtgagcctaaggataagcaggtgaagacgacaaacacaacaggaagacgtgcaaaaagggcaatgaagcgtgaagctgcaaacaaagcagcggaagtaactgcagcagcaaagcacgaggcccatttggttaggttgggaaggaagtga

SEQ ID NO: 2762 - DNA, 585 bp, Arabidopsis thaliana
  Clone ID: AT_T4C9.C1.o30.tg
tggaaggggactctctccatcagaaccaaactcaaacttaaaccagtcatcataagcgtcgaaaacatatctgaagagatcattgaagaccaaacaaccggtcgccaaacccgccggactcaggtttcagaaccttttctcatcaatatcaatctctgtagttctagtcacgaccacatccgaacgcttctccacgatcgattagtcggataccccttttggagttacttgtgcgatgacttagccacagagatctcaacggctgcaatagacttaggttttgggcgcaacggctttaccttgaccgtggacgctacagttacttacctgaccgtctccgttacgtcagacaacgagagatcattgaggatggttctgctagggagaataaaaacagaggaattgaagagtttgaagatggaaacagagccgtgttccatctgtctcgagagtctagtctccggtcctaaacctagggacatcacacgcatgacttgttctcatgtcttccacaatggctgtcttttagagtggctcaagcgtaagaacacttgtcccctttgtcggactgagctctacgattga

SEQ ID NO: 2763 - DNA, 1050 bp, Arabidopsis thaliana
  Clone ID: AT_T17F15.C1.o100.tg
atgagttcggtagaaccagacatggaagatctgttccaggagaagaagcgtgtcaggaatcctctcgttcctctcggtgcacttatgaccgcgggagtgctcacggctgggttgattagtttcagaagaggcaattctcagttgggtcaggttttgatgagagctagggtggtcgtccagggtgctactgtcgctttaatggttggaaccggttattactacggtgataatccgtggaagaagttacttttgtctgaaatccatgaaactgaagctctttcacctaaatcttcatctgcagcaacactaactcttatgaaccagaaagatccatcttcaagctctatagtgtctgttttatgtttagttatctctggtcttgctcttatcatcgtcttcctcggtgtcctctacttgatcttcaaatttctccgcaagtcctcgactttatttcccattccccatttcaactacaacccagatctcttttctttctcctcgcctcagctccagcacctgttcttcctccatgactctggtctagaccagactgccatcgatgcacttccagtgttcctctatggtaatgtaaccattagtcttgaacagccattcgattgcgccgtatgtctcaatgagttctctgacacagacaagctcagactactccctgtttgtagccatgctttccatctacactgtatcgacacatggcttctttcgaactctacttgccctctctgcagaagatcactctcaacctcaaacgtctgctacaaccactcggagactcttgtcgcccccttgtctgggcatcagcaggtggatgacggcaaagcctcccttgctaaaagagttttctctgttcgtctcgggagattcaaaagcacgaacgaaagtcaaagtcaacgacatgatgtcaaagatgaaatcggggtaagaatgccaagaagatgttactcgatgggcacgcaacagtatctcgtatgcgatcaagattttgtggtggctctgtcttcgtctcctcgtgagggaaatatcggtcggtaa

SEQ ID NO: 2764 - DNA, 2031 bp, Arabidopsis thaliana
  Clone ID: AT_T5N23.C1.o140.tg
atggtgagcaaatggaagaagatgaagctagctttgagtttgaatctctgcaactatctccccagaaccctcgaggaggaaccaccatcattggctttgaattccgctgagacattatcagatgctgctttgctctctcctcttaactggcccatgactccaacaccttcttcttaccgtcgaaggttgtccagaagtagcagcaaatcgtcaaagcagacttgctctatatgcttgaacaagatgaaagaaggttgtggacatgcaattttcacagcggagtgctcgcacatgtttcattttcattgcattgcttcgaatgtgaaacatggcaaccaagtttgcccagtgtgccgagctaaatggaaggaaatccctatacagaagccgagtttggatcttccttattacccctttgacaggtgcaataatgatgcagccattagccttttccgctgcttacctccttctcaacgagctataacccaagggcatcccgagccagctactttcgatgatgatgaacggttagaagagcagattgtttttgatggtgaaactgaagtcttgaagaaggagaaccgtgattatgtgcgaatgatggacatgaaagtgtatccagaggtctcagctgtaccacaatccaagtcttgtgagaattttgatgtactagtgcatctcaaagcagttactggtgatcagatttctcagtatcgccgagcgccaattgatttagttacagtgctagacatcagtggtagtatgggaggaactaagctagcacttctgaaacgagcaatgggttttgtgattcaaaatcttgggtccagtgataggctctcagtgattgctttctcttcaacagctcgacgtctcttccctttaacccgaatgtctgatgctggaagacagctagcccttcaagctgttaactcactggttgcaaatggtgggaccaatattgtcgatggtcttagaaaaggtgccaaggttatggaagataggctagaaagaaattctgttgccagcattatccttttgtctgacgggcgagatacatatactacgaaccatcctgatccaagttacaaggtgatgcttcctcagatttctgttcactcttttggttttggatcagatcatgatgcttcagtgatgcactcagtctctgaagtctctggtggaaccttttctttcattgaaagtgagtctgtgatccaggatgctcttgcacagtgcattggtggacttttaagcgttgcagtgcaggagctacgagtagaaattgaaggtgtgagcccaaatgttcgacttagctcgataaaagctgggagttactctagccttgtaactggtgatggccactcagggttggttgatcttggtgatctttatgctgatgaagagagggatttcttggtttctatcaacatccctgttgaggaagatggacatacaccattgctaaagctgagatgtctctacattaatcccttgacaaaggagattacaacgcttgaaagtcacgtgcttcagattcgaagaccagaatatgttgctgaagaaaaagttgttcccatcgaagtggtcaggcaaagaaacagattcctagctgcagaggcaatggcccaagcaagaactttagcagagcatggagatttagaggcagccgttaaagccattgagaattttagattggttttggcagagacggttgcagcaaaatcatgtgacaggttttgtgttgctttggactcggaactgaaggaaatgcaaggtagaatgaggagtagtcacatgtacgaggcatcgggaagagcttatattctttctggacttagctcacactcatggcaaagagcaacagcgaggggaaattcaagggacagttcgagctttgtccaggcttatcagactccatcaatggctgagatgctgcgtcgatcacaggccatgtttctagttagtccatcacatcatagactcattcagcccttgctctcttttgcttcacaaccaaagccaaggtaa

SEQ ID NO: 2765 - DNA, 2136 bp, Arabidopsis thaliana
  Clone ID: AT_F5D14.C1.o14.tg
atgggttgtactgtgagggagaagcacgtgaaaccgacccgtaggatcaaagccgctgcatttagatccgacccaccgttatgttgggtcgagaagattgctatgtcacaatcaattgttgagaaccttgtttatcatcctggtcttactgattccggttctgtcaatttgaattccgttactgagaatcctgaggagaatttttgggcatattgtacagaggagcatttggaagagattttgctgaaacatttggagtttttgtataatcaagctgtttctaagcttcttgaattgggctatgaggaacgtgttgcgttgaaagcggttttgagtaatggacactgttatggtgaattggatgtgttgactaatatagtgaataattcattatcttatttgaatagtggtggaggtggaggtgggagtaatgggaacggtgaggatcgaacggagactggttttacggatttgagagatttggaggagtattcgcttgcgggtatgatttacttgttgcaacaagttaagcctaatttgagtaaaggtgatgcaatgtggtgtttgttaatgagtgagctccatgttggtagggcaagtactctggatgtcccaacgaataggtctagttgttgtactaaggaagatagcaatgtagaagatgttggtacgggtggtactctagatattgctggttttatggcaccagcgttgtgtcgattccatggaggttggggttttgggaatgggggaggacctgagttttctggtaatgggttttctatgaaaggtgctgagttgaagttgcagagagagattgattgtcctaaaaggtttaatctttcgccatccatgaagtccttgttgaagcggaatgttgcagcgtttgctgctgggtatcgtgctagtatgaagcagaagcaaatacagtcgtctgatactattggtgatagcaaagcttgtaatgatcctgcaattgtgaagagttgtgggcagcaaccacgtaagtcagggagtgaagaaagtgttagtacggtgttggagaaatttcgtgatctgaaccttgatgataatctggaatcggtgggtgtggatgataaggattgtgtgatagtcgatctgcttcatcaggttaaggatttcgagaagaaagtaaaggaaaggaaagagtgggctcagaagaacgcaatgcaagccgcacaaaaggtcagcgaggaattagctgagcttaaaacattgagtagtgaaagagaaggaatccaactgctgaaaaaggggaaacaggctgttgaagaatcaactgcgaaaagatttactgacaaggaaattgaactcagaaaagcttgcagtcaaaatgacagggccaatgtaattgtaagaaagcttgagaatcaaaatgcagagattcgagcagagcgggagggatccaaattaagtgcatcagaatcgcttaaagcgtgcatggaagcatcaaagaaggagaaaaaatgcttgaagaagcttgtggcatgggagaaacagatattgaagttgcaggatgagattacagctgaaaaagaaaagattaaggccctatataagactttagctcaaatcacagagtatgaaaaggagattgaggcgaaatggaggcaagagcagaaggcaaaagaggaggctctggctcaaatggaggaagaacaacgctcaaaagaagcagctgagggtcacaacaagagaaagcttgagactttacgactcaaaattgaactagacttccaaagacacaaagacgatcaccaaagactggagcaagaactcggtcgactcaaagcctcttcagatagtgactcaagccacatatccaacaacgcttggaaacccaaaaaatctcaaggagaaaacattgctaagctgcttgaagaaattgataagcttgaagggtcttatgacaatgaagcaaactatgatcgagaatgcataatctgtatgaaagatgaagtctctgtggtgtttcttccttgtgcgcatcaagttgtgtgtggtagttgcagtgatagcttcttcgcgagcaacaacggcggaagcaaagtcacttgtccttgttgccgaggtttggttcagcagcgaatccgtatctttggagcaacctcataa

SEQ ID NO: 2766 - DNA, 1110 bp, Arabidopsis thaliana
  Clone ID: AT_T23E23.C1.o16.tg
atgtctgagaggaggattcattattcccagctcaaaaacgacaacttgaatcaaatctcgccttcttctgctccttctccaatcaccctgaatcatcaattaaccgactcttcttcttcttcttcctccggtggtaataatcgaataagccccatcattctcttcatcatcgttctcttatccgtaatcttcttcatctgtagcattctacatttgttggtcagatattacttaaagaagaaaagatcaaacctttcgtcatcaccaaacgaatctaatcaaaacccagaattttccgactccgatacttaccaaagacagcttcaacagctctttcatctccatgattcaggtctagatcaagctttaatcgatgctcttcctgtgtttctttacaaagagatcaaaggtacgaaagagccttttgattgtgcagtgtgtctctgtgaattctcggaagatgataagcttagattgcttccgaattgtagtcacgcttttcacatagattgtatcgatacttggcttctctcgaattcgacttgtccactttgtagaggaacccttttctctttaggtcatcaatttgaataccctgatttcaatttcgggtttttcgccggagatgatggaggaggaggagttagggtttctccggttcagaaaccagctgagaatgagattgggaagagagtgttttcagtgaggcttggtaagtttaggagcagtaatattgtcaacaatggtgaagtagtagtaggaggaggaggagagacaagtagtagtagtcttgataatagaagatgtttctcaatggggtcttatcagtacatagtggctgaatcagatctggttgttgctttgtgtcctaataatgaaggattgaagaataataaggatgttgaagggaagaagattaatatgagaagtaaaggtgagagcttttctgtgtcaaagatttggcaatggtctaataagagatcaaagtttcctaataatcatccatcagagactaatcttgtggttggtggttcttcttcttcttcttcttatgtttgttctggatctgatgggttatcattgaatggaaggagatttcagggtccatga

SEQ ID NO: 2767 - DNA, 834 bp, Arabidopsis thaliana
  Clone ID: AT_F17P19.C1.o3.tg
atgtctcggcttgtaaaccagtcgtctgtcgatgaaaatattgcagtctatttacaaaacgagttatcagaactgacggttaatgattatgctattggtcgggagatacaacaacaatatcaaaataaatcgatatgtaacgatgctgctattgctttggagattcagaaagaagaagaagcttgtgtacactcttgcttacatgacgatgaaggattggcaagaacgttgcaagacttggaggctaatctgcagccctctctaagcgatgatgaaaaacttgcaagatatttgcaagaacatgatgaattggcaaataatacggaagatgatatccaagaaacacatcaccatcagtaccaccccatgcaagtgaatcgttcatacatacctcaacgtgatgctccatcgtctagtagagccatttttcactatgacgatggtgagaacttctcgggtcgttatacgcatactcatagtccttcaagcatttcccacaatcctactgatgatgagaacaatgatcccgaaaatatgacgtatgaggaattaactgagttaggagactcggttggagatgtcggtaaaggattatcgcaagagaggatctctagattgcggactcataagtatggtactaaaaccaaatcttggtactgtttgcatatgaaaaagaagtttgttgccgatgattctcagtgttcgatatgtctaatggagtatgcaaaaggagataagattacaactttgccatgtatgctgcatttgcaaggccgaggtttatccataatactaaatctcgtcggaccaacgatctataatgttcggttttga

SEQ ID NO: 2768 - DNA, 1236 bp, Arabidopsis thaliana
  Clone ID: AT_K13E13.C1.o3.tg
atgcgattcgtcgcgccaccgcctcgttccggcgataactcaccgtcaccttcaccatcttccggtatatccgaagagattctctcccgttcttcggatcctcctttagagtttagtcctccattgatcgccatggtggtggttctagccgccgcttttctattcgtaacttactctcgtctcatctcccgccgttttctttcacctctattccgtcgttttagaaggtggcgatgccgtcgacgccgtctccttcacttatcttcagcttcctctgcttcaacttcatcctccgatctccgatcattttcacctttccctttcgactcttttcattactcttcttactcaccttacggattagacgattccgttatcaaaactttaccgctgtttctctactccgccgctgcttgcaccggaaaacccgcggtggggaaaacctccgccgccaattgcagagattgtgctgtttgtttgttggaattcgaagaaggtgattatgtacgaacacttccgttatgcttccatgcttttcaccttgaatgcatcgatgaatggctccgatctcaccctaactgtccgttatgccgtacggcgattctcggatccgccggagttttaacgcctatgtcgccgttcgttccgttaatggctcctcgaattcgtccgagtctcgatgatgaagagaataacgcgatcatcatccgcggcgaaatcacaccgtcgcggagcaattggaacacaatcgctgccgatacgacgaacgatcaggagatcagagcgtcggtggaagagcaatcatcaccggcgatttctcggttccgggagctgaagagatcgtactcgttcgaatgcgagagagaatctgaatcagagagagtaacgatggagccagcgacggtgtctccatggagataccggagatctacatggaacaaacgtcaatcaccgttcggaaacctaatatcgaaatcaagagtgttctcgttccgttactacagaagcacgaaatcaccgttcttccgacggagatcatcggcgggagtgttttacccgatatcagaacggattccagcgacgggaagctcatcgcggcgaacgaaatcgatgacgagtccgatgttcttcagaacagcaccgcactcatcgagccggttaagatgcggagatccagaggcactgttatcgccggagagatggagaagaagagacacgtgtagggcagagatgtaa

SEQ ID NO: 2769 - DNA, 456 bp, Arabidopsis thaliana
  Clone ID: AT_T14G11.C1.o12.tg
atgggtttcaatgatccttcattaaacacaatcatcctttggttcgcctccgtaacgtctctcgtgactatctcagtcatcttcgcccttctcattatttgtttactcaaacgccgtaggtttgatgtatcaccggaaaccgagaacgagaaccaaggaagaagagagccacggtgccaagggcttagcgcttccgtgattgctgcctttcccaccttttcttacaaaccggataataatgatcctgagagcaacaatcaggagatcgagtgtccggtttgcttaggattaatccccaagaatgttgtaattaaggttttaccaaattgtatgcacatgtttgatgaggaatgtatcggtaagtggcttgaatcacacgcaacttgtcctgtgtgtcgtagattggctgagccaatgactagcaatggagataaagtcttagaaagaatagtatag

SEQ ID NO: 2770 - DNA, 2700 bp, Arabidopsis thaliana
  Clone ID: AT_F7A10.C1.o17.tg
atggagaatcaggaatcggacgagccgatgcagaagaagcctcatcttttagactccgtttctccgaattccatggctcgtaactcttcaccttctcaccctatagctaaaagtgtaagctttttcgactgtgacttctcgcttctctgtttaaggctcgttgattatgaaattgatgttgatgccactgttctacagttacagaatcagaaactggttcagcaattagacctgcagaagaaacagctgtacgatgttgaaagcaagatccaagagttgcagctcaaccaaacgtcttatgatgatgaacttatatcagtgaaccagctttggaatcagttggtagatgacctgattttgcttggtgttcgtgccggggctaatcaagaggctctaaactacttggacattgtagataaaaagcgagttccaccatgcgctgctgatgaaacgtttctatgtagacttctgcaagtagattccttagatactagtaagagtgatgaggtagtaagaaaggttgaagaagctcttgctttgcgtcattcctctacaatggagttgatgggactctttgagaacaccattgatacacagaagacgaaagctgaaagcatttcacaaagtttacatgctgtaaaatcgacagaagatgccaccatccagttatctagcattaatgatttgatgaaagaggagtccaaaaacttgcgtgagatgattgatgctttacatgtgaggcacaaagaacattccgagcagattcaggcgtacataagcagccattcaacagatcaatccgagcttaaacaccttaaaggtcaattggaagagatcaaggctgagcttgaagaaaatagaagaaaattgataactctgaaaatgcagaaggatgctgcatgtgaaggtcatgtaacatcaccggcaatagcaaatggaagtctttctcctgagaagcctgtagataaaacgaagttgcgtgaattgaaggactccattgatgagataaagataatggcagaaggtcgtctgtctgagcttcaagcttcacaagagtataatctttccttgtcaagacaatgtcaagatattgagaatgaactaaaggatgaccagtatatatactcgtctagactgtatagtttgatcaatgatcgaattcatcactggaatgctgaactggaccggtacaaaattctgactgaggccattcaggctgaaaggtcctttgtaatgagacgggataaggaactaaatctgagggcagaatctctagaggcagccaaccataagactaccactgttggttctagaattgaagtgctggaaaagaagctgcagagttgtataattgaaaagaatggattagagcttgaaacggaagaagctattcaagattctgaacggcaagatattaaaagcgagtttattgcaatggcatcaaccttatctaaagagatggaaatgatggaagcacagttgaaacggtggaaggacactgcacaagatgctctttacctgcgtgaacaagctcaatcgttgagagtttcgttaagtaacaaggcagacgaacagaagggtttggaggataaatgtgctaaacagatggcggaaattaaatctctcaaggctctaattgagaaactactcaaagaaaaactacagctgcaaaatctagcaagcatctgtacgcgtgaatgtaatgatgacaggggactggcagaaatcaaggattcacaacggaaagcccaagctcaggctgaagagctgaaaaacgttttggatgaacactttcttgaattgagagtgaaagcggctcatgagactgagagtgcttgccaagaaaggcttgctaccgccaaggctgaaattgctgaattgaggactcagttagatctttctgagagggaggttttggaacttaaggagggtattaaagttaaagagcaggaggcagaggcatccattgctgaaatggagactataggtcaagcctatgaagacatgcagacacagaaccaacatttgttgcagcaggtggctgagcgggacgattataatatcaagcttgtttccgaaagtgtcaagacaaagcatgcttacaacactcacttatctgagaagcaagtaatggaaaagcagctccatcaggttaatgcatccgtagagaattttaaagcaaggattgcacataatgaggaacagatgaaaggctgtttttctgaggcttataaattgattcaagaagatcgtcacctcgttatcagcctcgaaaccaccaaatgggaagtagctgatgctgacaaggaattcagatggctcaagtcggccgtgtcttcatccgaaaaggaatatgaacagatcagtaggaggacagacgacatcaaactggaactggatgatgaaagggagaagaagaagcttgaggaagagcttatggagttgaacaaagagcttgaagagttgggttctgagagtgtagaagctgcaattgtgaggctccaggaagaagttaagaattgcaaaaacatcctcaaatgtggtgtatgttttgatcggcctaaagaggtggtaattgtgaaatgttatcatctgttctgccagcaatgcatccaacgtagcttagagatccgacaccggaaatgtccaggctgcggtaccgcctttggccagaatgacgtccggcttgtcaaaatgtaa

SEQ ID NO: 2771 - DNA, 636 bp, Arabidopsis thaliana
  Clone ID: AT_MZN14.C1.o8.tg
atggaaacagaatctttcaaactcgatgttcatgtacaagctttgtctcaagatcagtcgttagggttcgtaagtacggtactaatcagtcaatacagagaagtagaggaatttctcatcaacgagaaggatgatactgtcacaagtctcggatcttacccggaggattcttctactagtcacgacccactaatctctctgaaactcccaagtttcaaaccaaacgacgtctatcaacgtctccagacccatctccacgatcatgacttgtccgaacaattatcttacaagattgtccaagcccaacaacggcaaaaaagacaaagtttttacttgccacaacaacgacctttattcatgatcgtctctgtcaaattgacacacaaggtttacaacgttgtgtcttgtgattctgctccgttggcaacagatttcgaccaagagagccaacaagaagaagaagaggaatcgaagacttgtgccatctgtttggagaatttgttgagatcggaggattactgcgagatgcctacttgttcccattattttcatgaaccatgtctcactgagtggttgactcgagataataactcatgccctctctgtcgcaaacctgttgacaaactacacagttga

SEQ ID NO: 2772 - DNA, 768 bp, Arabidopsis thaliana
  Clone ID: AT_F25A4.C1.o27.tg
atggaaacagttcatggtcaacatccatcatatcgagatcctcacagtttgatctttggttgcaatcactacaagagaaattgtaaacttcttgctccttgttgtgacaagctcttcacatgtatacgatgccatgatgaagaagctgatcactcggtggataggaaacagattacaaagatgatgtgcatgaaatgcctcttgattcaaccgattggtgcaaattgctcaaatacttcgtgcaagtcgtcaatgggaaaatacttctgcaaaatatgcaaattatatgacgatgaaaggaaaatttatcactgtccttactgcaacctctgtcgagtagggaaaggattgggtattgactacttccactgcatgaaatgcaatgcttgtatgtcacgtaccttagtagagcatgtttgcagggaaaagtgcttagaagataattgtccgatttgccatgagtatatcttcacctccagctccccagtgaaggctcttccttgtggtcacttgatgcactccacatgctttcaggagtacacatgttcacattacacatgccctgtctgcagcaagtcgcttggagatatgcaggtctactttaagatgttagacgcattgcttgcagaagagaagatgcctgatgaatactccaacaaaactcaggtgatcttgtgtaatgattgtggaagaaaaggaaatgctccttaccattggctttaccacaaatgcacaacctgtggctcctacaactcaaggctcctttag

SEQ ID NO: 2773 - DNA, 1395 bp, Arabidopsis thaliana
  Clone ID: AT_T15N24.C1.o30.tg
atggaggacaagcttgatgtactcattatgggagagctcaaacttgagctagtagagctacgccattatttcccaagctcacctttgtttgactcgatcacaaaactcagtgaagggagagagggagagagggaggagagatggcgttgtctaaccaaaaaaaaaacgagaatagataaagcagcagcggttgctgtcggagttttgcttcgaagacaaaaaactaaggttgttaggttttataggccaacgagtgaagataaggtatttgatgaaaatgcctcactgatatatccatccatgtctttttttttacatctcaagctttactctgtttctctttgctcttgttcaggagatcaaatcaaagacctctctgtttccgatatgagtacccgttattcctctcagttgcaatcatcagccattaactccatcactgtctcctcatcttcttccttcgcttccacgcaactggatgataacactcacacggctccggagagctctccatcttcttccttcttcatgagacttgccatgagggtatctagagcaaggtggttcattttcttgagaagagtctttcattaccagaacgcctcaagatccgatcttggcaccaatcctttcaattctatcgcttggatggtatcagagctcatcgctttacttttacagatcactgtgataacatccacactagctttgtccaaaaacgagaggcctgtttggccgatgaggttatggatcactggctacaacgttggatgtctgctcaatcttatgttactatacggtcggtatcgtcagcaagatactagccatgaaaatgcatttagcttcggcgatattgagcagcaacaaagaagcagggaagagaccaccaggtgctcgcatttgatgaacaaatgccggacatcgctggagctattctttgcgatatggtttgtgataggtaatgtatgggtttttgattctcggtttggttctttccactatgctccaatccttcatgtcctctgcatctccctactcgcttggaacgctctctgttactccttcccatttcttctcttcctcctgctctgttgtgttgtacctctcgttagtagcttcctcggctacaacatgaacgttggatcttcggaaaaaggagcttcagatgaccagatctccagtctcccaagttggaaatacaaactcattgatgaaacttctgattcttctcaagcaaacaatgatccggaatgttgtatatgtttggcaaagtacaaagagaaagaagaagtgagaaagcttccatgttcgcataggtttcacctcaaatgcgtagatcaatggcttcgtatcatctcgtgttgtcctctttgcaaacaagatctccctaactga

SEQ ID NO: 2774 - DNA, 1284 bp, Arabidopsis thaliana
  Clone ID: AT_F11M21.C1.o30.tg
atgccttccttgaagagcttctccgccgccgaggaagaagatgaccaactgggtcggaactcagaagctgaaagattcaatcctgaagctgtggagaaagaagaagatccagacaaaatggatgagaaggacgaaagtggagatgaggaagacgacgtgaaacgtgaccaagtagaagcagaggatgaggaagcgttaggagaagaagaagattctaaggaaagaagtcaatcttcttcagcaggagagttatcagaatcagaatatatggttgttgatctagcggatatctgtaaggacgtgcaatgctcgatatgtttagggattataaggaaaacaaggactgtgatggaatgtctccaccggttttgccgagagtgcattgataagtcaatgagattggggaacaatgagtgtcctacttgcagaaaacattgtgcaagccgacgttctttaagagacgacccaaactttgatgccttaatagcagctttattcaaaaatattgataaatttgaggaggaggaattgaattttcgtcaagatgatgaagctcgtaataagcagattcaagcatctatagctcaagtatcgcaacgacaatctaaggcccttgtaaaaagaaagtctgttggtaaaggcacagcgatcttatcgagatcacgacgtagtggtggcggctccagaagaagaaggaactgcagaaacattgaacaggatacatcagaagccaatgatgatgatgatcaaaacaaaagaggcaaagattcttcttcagatgagccttgtgagaggcaacgaaaaaagcgttcagcaactcagccttcttcttcaaatgcaaacaacaacgataactgcgcaggtaatggcacagagcagacgcatcagagggacagcagagtaatatcacctgtgcttgtgtggaactcggaactaattgcatggggaagaggcggtacaaggagtaacacaaggcaaggaaataataaccaaggagctattagtaagagaaatgctcgcttgaaaagacttgtggaatatctcgggagcttagagggtaatagtgtcgagtatgtggcacgccatttaaaattgaaggctgaagaggttgaattgttggtgtctaaagatggggatacggtcattgggaataagacctcaacagagaagatgcaaagcctgcaagatgatgagaccgtggcaaagctaaaagttgattgcatttcgagcaatggatatatggtactgtcactaatattagtgtctataattcgtttattctaa

SEQ ID NO: 2775 - DNA, 933 bp, Arabidopsis thaliana
  Clone ID: AT_K2A18.C1.o24.tg
atgagactcgtcgtctcaagctgtctactagttgcagctccttttctctcctctctgttacgagtctcactcgccactgttgtcctcaattccatctccgcctcttttgccgatctcccagccaaatttgacggctccgtgaccaaaaacggaatctgtggagctctatacgtcgcagatcctctcgacggttgctcaccgcttctccacgccgccgcatccaactggacgcaacacagaactactaagttcgctttgataatcagaggcgaatgttcttttgaggataagctgctcaatgcccagaactcaggttttcaagctgtgattgtctatgacaacattgacaacgaagatctcatcgtcatgaaggtgaaccctcaggacattacagttgatgcagtcttcgtttcaaatgtcgccggtgagattttgagaaagtacgcgagaggccgagatggtgaatgctgccttaatccgccagacagagggagcgcttggactgtgttggccatctccttcttctctctccttcttatagtcactttcctgttgattgccttctttgcacccagacactggacccaatggcgagggaggcacaccaggaccatcaggttagatgcaaagctcgtccacacactcccctgcttcaccttcactgattctgctcaccacaaggccggggaaacatgtgctatatgtctcgaggattacagatttggagaaagcctcagacttctcccctgccaacatgcttttcacttgaattgcatcgactcttggttgacaaaatggggtacatcttgccctgtgtgcaagcatgacataagaaccgagactatgtcttctgaggtacataaacgagagagtccgagaacagatacaagtacgagtagatttgcctttgcccaatccagtcaaagccgttag

SEQ ID NO: 2776 - DNA, 1182 bp, Arabidopsis thaliana
  Clone ID: AT_F11M21.C1.o28.tg
atggatgtcgtttgtacggaacatcaaatgaggaagccaacggtggagattcctccgagaaagcttcttttatcttccaagagttttccttctgattcttcttcccctcgctcgccgcgtaaacataactggaacaaaagcaacaagattacatctgaacatgaagaagacaacgaagacaacaacagagagaataaagagtactgttatgattctgactctgatgatccttacgcaagtgatcatttccggatgttcgaattcaagatccgtcgttgcactcgtagccgaagccacgattggactgattgtccttttgctcatcccggtgagaaagctcgccgtcgtgaccctcgtcgctttcaatactccggtgaggtttgtcccgagtttcgtcgtggtggtgattgtagccgtggagatgattgtgagtttgctcatggagtcttcgagtgttggctccatcctattcgttaccgtactgaagcttgtaaagacggtaaacactgtaaaaggaaagtctgtttctttgctcattcgccacgtcagcttagggttcttcctccggagaacgtttccggtgtctcagcgtcgccttctcctgcggcgaagaatccatgttgcttgttttgtagcagctctcccacgagcactcttttgggtaatttgtctcatctttctcgatctccgtctctgtctccacctatgtctccggctaataaagccgctgctttttcacggttgaggaaccgcgccgcttctgccgtttccgccgctgcagccgctggttcaatgaactataaagacgttttgagcgagcttgtgaattctttggattccatgagcttagcggaagcgctgcaggcgagttcctcgtcgcccgttacaactccggtttccgctgcggctgccgcgtttgcgtcgtcctgcggtctgagcaatcagcgtctccatctccagcaacaacaaccaagtagccctttgcaatttgctctttcgccttccactccaagttacctaactaactcacctcaggcgaacttcttcagtgatgatttcactcctcgccggagacagatgaacgatttcacggcgatgacggccgttagggagaatactaacattgaggatggttcttgtggtgaccctgatctaggatgggtcaatgatctcttgacttga

SEQ ID NO: 2777 - DNA, 1059 bp, Arabidopsis thaliana
  Clone ID: AT_F13I12.C1.o170.tg
atgaatccattgacgcaggtgaagaatctacagaagataaacgctagggaatcagatttaggaatatctgatgaagcttcatggcacgctaagtacaaaaactctgcatatgtctacgtcggaggcataccgttcgatctcaccgaaggtgatcttctcgccgtcttctctcaatatggtgaaattgttgatgtcaatcttattcgagacaagggaacgggtaaatctaaaggttttgcttttcttgcttatgaagatcagagaagtaccattcttgctgttgataatctgaatggagctcttgtgttgggacggaccattaaggtggaccattgtggggcatacaaaaagcacgaagaggaggatgaagagacgcgacgccagaatagagaggctcgtggtgtatgcagagcttttcagagaggagagtgtactcgtggtgattcttgcaaattttcccacgatgaaaaaagagctgcaaatactggttggggtcatgaagaggatagaagttccaagtgggatcatgacaagaatagagagggtcgtggtgtttgcagagcttttcagagaggagagtgtactcgtggtgattcttgtaaattttcacatgatgaaaaaagagctgcaactactggttggggtcatgaagaggatagaagttccaagtgggatcaagacaagttaaatggtgctaaaaagggtggtacaagttttggcaatcgaggagatttcaaacctgatgtggaagagaaaagttacagaggaaggggtgatggagatgcctcgtatggccgccctaaagagagagaaagagtggatagggaggatatggggccaaggtcaagagatgcttatgatatgaaggaacaaaagagatcaggacggtatgataatgcgtattctagaaggcacaatgatgaaattgattatgtaagggaggacaagggatccagagcacaagattgggagaaaaggaaggcagaatctagaagagatcgtaacgacagggaggaaaaagatagggattcattaagaagggaagatcgccgtcgttaa

SEQ ID NO: 2778 - DNA, 1092 bp, Arabidopsis thaliana
  Clone ID: AT_MOJ9.C1.o23.tg
atgtctcacagggatcatggagccgatggatgggaaagcgccgatttcccaatcacctgcgaatcttgcttcggtgacaatccgtacatgcgaatgacccgagcggattatgataaggaatgcaagatatgtagtcgtcctttcacagcttttaggtggcgaccaggccggaatgctagattcaagaaaaccgagatttgtcaaacttgctctaagctaaaaaatgtatgccaagtctgtcttctggatctcggttttggtcttcctgttcaggtcagagactcagcactcaatattaattctcactactctgtcccaatgagccatgtcaacagagagtactttgctgacgagcatgacccaaagactagagctggactggattatgaatcttcatttgggaagatgcaacctaatgatactattttaaagcttcagagaagaacaccttcctatgaaaagaaccggccaaaaatttgtagtttctacaccattggtcagtgtaaaagaggtgccgaatgttcattccggcatgagatgcccgaaacaggagagctatcccatcaaaacataagagatcgttattatagtgtaaatgatccagtcgcgatgaagttactcagaaaagctggtgagatgggcactttggaaccaccagaggatgaaagcatcaaaacactttacgtcggtggacttaactcaagaatctttgagcaggacatacatgaccacttctacgcttatggagaaatggaatctatcagagtcatggccgaggatggcaaatatgatcaaagtggttcaaaccaacagcaacagggcagtatcgctcatactggattaatatctcagcagcagaatcaacactcacaaatgcagcagtactatatgcagccaccaccacctaacgaatacagtcattacccatcaatggacacgcagagaatgggtgcagccttttcaacccaagagagtgatggttcaagcaccagtgagaacaacagagcttattcttcttactcttacccgatgccaccacaccagccgtaccccacaccaccaccatatatagatatatatatatatatatga

SEQ ID NO: 2779 - DNA, 1782 bp, Arabidopsis thaliana
  Clone ID: AT_MHM17.C1.o1.tg
atggcgcccagaattttactctgtggagatcctcttggacgtctcaatcagctcttcaagcgtgtccaatcggttagcaaatctgctggtccctttgatgctctgatttgcgtcggacagttttttcccgattctccagaaattctagatgagtttttggattacgtcgaaggtcgagctcaagttccgattcctacttacttcaccggagactatggtgtcgtcgcacccaaaatcttatcgacgacttcgaagaaagctgagaatcaagggtttaagatggatggactcgaagtttgccacaatttgttttggttaagaggaagtgggaagttcagtctccatggtttgtctgttgcttacttatctggtagacaatcatctgagagtcaatttgggaaatatagtcaagatgatgttgatgctcttcgtgcacttgctgaggaacctggaggatgtattactaatgaatggcctgcgggagtcacaaacagagctgcggtttctgatattcctgttggaatttctgattcctcttgtagtgattccactgtttctgagttggtaatggaagttaaacctcgctatcacattgcaggttctatgggggtattttatgcccgtgaaccttacctcaacgctgaatctactcatgtaactcgctttattggtcttgctcaagttggaaataaaaacaaacagaaatttcttcatgcgctttctcctacaccaacatctaccatgtcaccagcagagcttagtgcaaagcctccaaaaactacgctatggccttataatttacaagatggagctgctgaatcgaagaagaggccaaacgatagtgactctgattcacagtattggaggtatgatgtcccaaagcggcaaaagagtggatctcaaggggaaaagctctgtttcaaatttgtctgctcaggttcctgtcctcgtggtgaagattgccatttccaacacaacgctgaagcaagagaacagtgtcgtagaggtgtttgtcttgatcttatcatcaaaggtaagtgtgaaaaaggcccagagtgcagctacaagcatgagtttcaagatgaaagtagcatacaaaggaagcccagatctgagaatgctaacaggtcaaaagaatgctggttttgtctatcaagcccgagtgtggagtcacatttaatcgtcagtgtaggggaaagtttttattgtgctctacccaaaggttcgctagtcgaagatcacatattgataatcccaatcgaacatttgcccaatactctggttttatcccctgaggttgaatcagagctcagtagataccaaaatggtctgagaaattgttataagagccaaggaaatgatgcagttttctttgaattggtctctaaacgtgtttctcatgctaacctccaagttgttcctgttccatcatccagagctcgtcttcttcctaatatctttagtctggcggctgaaaaactgggctttaagcttgtgactaaaaagtttaatgatagtactgatggcagaaaatatctgcagaaggaatataatgcggcattgggtctcttctatgtggaacttcctgatggaactgtgctatcacacaccttggaagaaaacgaagtattccctgcgcagtttggacgggaggttctagcagggttgctaaagatcccagatagggccgattggagaaactgtaaaattagccaagaagaggaggcaaagctggctgaagatttcaagaaacaatttcaagaatttgacccttgccaataa

SEQ ID NO: 2780 - DNA, 1146 bp, Arabidopsis thaliana
  Clone ID: AT_K9L2.C1.o1.tg
atggacgtcgaacatcacaaatccggccacatcagtagaccaacggtggatattccaccgaggaagcttctttcctccgccaagtctccgtcgtcagtttcaagtccccttcgcgactataaagaacagaaagactattgttacgactctgactctgaggatccttacgctggagaccatttccggatgtacgaattcaagatccgacggtgcacgcgtagccgtagccatgactggaccgactgtcctttctctcatcccggtgaaaaggctcgtcgccgtgaccctcgccggtttcactacaccggagaagtatgccctgagtttagccgtcacggtgattgtagccgtggtgatgaatgcggtttcgctcacggggttttcgagtgttggcttcatccgagtcgttaccgtacggaagcttgtaaagacggtaagcattgtaagaggaaagtttgtttctttgctcattctccacgtcagctgagagttcttccaccgtccccggagaatcatatttccggtggttgcggtggatcaccgtcgtcatcccctgcatcggttttaagcaataaaaataatcgatgttgcttgttttgttcccattctccgacgagtactctcttgaatttatcacgatcaccttcatcgtctccgcctttgtctccagctgataaagccgatgcattttcacggctgagccgccgtcgcaccgccgtactaaacgaactgattagttctttagattccttaagtctcacggaagcacttgcagcttcttcatcgtctcccgttaccatgcccatttccacggcgacgatgatcgcttcatcgaatctaagcagcaaccaccaccaccaccgtcttccgccgtggcttgatgtcggagacagagatctccaattacaacagagtagtcctctacgatttgctctttcaccttcttcaactccaagttacctccatggccagcttcagccaccaccgtcgagcttctttggcgatgaattcacaccacgtggtggccggctaagcgatttctcggtggctgcagctgcggcggcccaagctagggataaaaatagctttgaagtcggttctagtggcgatcttgatctaggatgggtgaacgatcttttgacatga

SEQ ID NO: 2781 - DNA, 1116 bp, Arabidopsis thaliana
  Clone ID: AT_F11A3.C1.o17.tg
atgcctccaaagcaacaaccaaaggctgatttggcgaagaagcagaaacaagtggaagacaaaactttcggattgaaaaacaagaacaagagcaagaatgttcagaagtatgttcagagtctcaagcaatctgttcagcctaaacccgatgcaactaaagctgcagctaagaaaaagaaagaggaagagaaagcgagagaacaggaattgaatgagttgttcaaggtagctattagtcagcccaaagttcctgtaggtgtggatccaaagtctatactctgtgagtttttcaaggccgggcagtgtcaaaagggtttcaagtgcaaattctctcatgatttgaacattcaaaggaagggtgagaagattgatatttacagtgatacgcgtgatgaagatggagatatggatgagtgggatcaagagacccttgaaaaggttgttgaatcaaagaaaaatgaatataatcagaataagccaacagatatcgtttgcaagtattttctggatgctgtggaaaagaaacagtatgggtggttctggtcatgccccaatggtggcaaagagtgtcattacagacacgcgcttcctcctggatatgtccttaaatctcaaatgaaagccctcttggaagaggagtcatcgaagaagctggcagttgaggacgaaatcgaaaacgagcgtgcaaaactgcaaaccgcaacacaaatgactcctgcactatttatggaatggaagaggaagaaaattgctgagagagatgccggtttggctgcttctcaagcggagagagctaagaacgaccgtatgagtggtcgggagctgtttctgtccaatgcaagcttgtttgtggatgatgctgaggcttgtgaagaatacgagagggaaagagagcaggaagagactgaacaaaaggcaaagaacaaagaagcagaggcagggacaagcaagagtagtggtgatgctgaacagagttcgaaagaagtcaatgaagaagaagaagatgacgatgatgatgatgatgacctagacatggatgagctggatgaattggaagcaagcttgtcgaaaacatcgatccagattcgtgagccaaacgacgaagggtcatcttga

SEQ ID NO: 2782 - DNA, 1494 bp, Arabidopsis thaliana
  Clone ID: AT_F27C12.C1.o25.tg
atggcgagcgaagaaaacaacgaccttgaaaatcttcttgacattcagctaattgaacaaaaagaatctctttcctccattgacgaagccctactctctgacccatctaatcccgaactcctctcggtccatgaagaacttctcagtgcaatcaaggaggtagaggaagggcttttgcatttaaaacgagctcggttattggaggaagctgatatagtgttgaatggtctaaatcatgatgctggagttaaacctgagcatctggagccagagaaaactgaagagaaaaaggatttggatggatcgaaatgtcggtttcgacatactgatggtcgttggtataatggtcgtattattggatttgaaggctctgattctgctaagatctctttccttacacccacatctgagagtatgatgatttgcaagttttttatgcagcagaggtgtcggtttggcagttcttgtcgttcatcacatggactagatgtgccgatatcttctctgaagaactatgaacagactgagtggaagcaattgatggtaggctctaagatttgggcggtttctggcagtaaatacgatatatggagaaaggctgaacttgaatcatgggatgatgagttacaagtaggcggagttgttttcagagatgataaaagctctgcaaagctaggatctgattctttggcattatcagagtacgctcagatgactgatgatgatggggaagaggaggaggaggaggatgaacaacagagtgcttcagattctgaagattctgtttcaagtgattatgatgaagggtctccacaaggcataggctttctagaaagcacaaatctaccaagaggtgtccaaactgacactgccttatttgctaaatgggagaatcatactagaggaatagcttcgaagatgatggcaagtatgggttaccgtgaagggatgggtcttggcgtctctggccaagggatattaaatccaatcttagtaaaagtacttccagcaaagcggtcactggattatgctcttgagcacattaggaatggagaatgtaaaagcgagaaacaaaagaagaaaaggagcagaggtgggaaaaggaagcgtgggaagaagtttgcagaagcagctaaagcagcgaaacaggaagaggaatcgaagccagatttgtttagcttaatcaatgaacaaatttttcctacccgccatgagaaagtacacagcgagtctgtaaaaaataggcaaaacaaaggtccagtagacaggaaagctttggttgaataccaagatgaagtcagagacttgaagttagaaatgttgaaactagaacagatggtgaacagaaacaagaaagatctagttgtttcagaggctgcgacgagaagattgaaagaagtccgaaaggcattggcaagtacattagcatgtcaagcagctgcctcaaatgctatagtaagcaaagagaatgagaagaaatggctcaagttttag

SEQ ID NO: 2783 - DNA, 1314 bp, Arabidopsis thaliana
  Clone ID: AT_MSG15.C1.o6.tg
atggatttcgatttgaacggaggaaacaaacgagtcttcaacagactcggtggcggtggcgggtcaactcgtccgatggcaccaacggatacaagacaaaaggtttgtttccactggcgagccgggcgttgtaatcgttctccttgtccttatctacatcgggaattaccgggtcctggtccgggtcaaggtcaaggcccgggttatacgaacaaaagggtcgctgaggaatctggtttcgcgggtccgagtcatcggagaggacctgggtttaatgggaactcgagtagtagttgggggagatttggtgggaacagaacggtgacgaagactgagaaagtttgcaacttttgggtagatgggaattgcacatacggtgataagtgtagatacttgcattgttggagtaaaggagagagctttgcgttgttgactcagcttgatggtcatgagaagcttgttagtggtattgctttgccttctggttctgataagctttacactggaagtaaagatgagaccttgcgtgtttgggattgtgcttctggacagtgtacaggagtactcaaacttggtggggaaattggctgtgtgcttagtgaaggcccgtggctattagttggcatgccaaaccttgtcaaggcgtggaatattgaaaccaatgctgaccagagtctaagtggacctgttggccaagtctattctcttgttgtgggtactgatctgctctttgctggaacacaggatggctctattttggcatggagatataatgctgccactaactgttttgaaccatcagcgtcactgacgggccatacacttgcagttgttaccttatatgttggggcgaacagactttattcgggttccatggacaaaactataaaagtttggagtttggataatctacagtgtatacaaacactcactgatcattcatcagttgtgatgtctctcatttgctgggatcaattccttttgtcttgttcattggacaacacggttaagatatgggctgcaatcgaaggtggcaatttggaagtaacatatactcacaaagaagaacatggagtgctagctctatgtggtgtacatgatgcagaagccaagcctgttttgttatgcgcttgcaatgacaacaccttgcgcctctacgacttaccatcatttacggagaggggaaaaatctttgcaaagcaagagatacgggcgatccagataggtcccgggggcatatttttcacgggtgacggaactggtcaagttaaagtatggaaatggtgcactgaaccaaccgcggctttgccttga

SEQ ID NO: 2784 - DNA, 1419 bp, Arabidopsis thaliana
  Clone ID: AT_MHK7.C1.o11.tg
atgggtcatcagtcatcatggatgaagcaaacagttatcgactctgtggttcagtcttctaaagttggtgttttctcaatgtttagtatggattacaaggcgccaaggaaatactcacacggaaggaattttggagttgcgagacagcaagattttgcagcagatatagttacgagaagaccttatgccccgtatgacaatggtatgaagaaaggtcctaataagttgtcaaggaatctggtttggacgtcaaaagagtacaaatcaccagagggaaacaggccaaggcagaatgcagccaatgggtcagcgaaaccacaagttataggcacaggacatcgtgtatcaaaccagccgaggaagaatgctgtgtatgggccaaggagctcttctctttcagacaccagaggttgtgggccgagactcaatggcagtcccaaaaagagtgtgtgtaatttttggaaagatggaaactgcaaaaagggcgagaaatgccagttcttacactcttggtcttgttttcctggactggccatggtagctgctcttgaaggacacaagaatgatattaagggaatcgcccttcctcagggttcagataaactcttttcagtcagtggtgatggtacattgctaatttgggactgcaattctggtcagtgtgttcgatccatcaacctccaggcagaagcagggtctctaattagtgaaggaccatgggttttccttggcttgccaaacgctgtaaaggcttttaacgttcaaaacagtaaagatgtgcatcttgaaggggtggttggtcaggtgcatgcaatgactgctgcaaacggaatgctttttgctggaacaagttctggtagtatattagtctggaaagctacagactcggagtctgatccattcaaatacttgacatctctcgagggacatcatagtggtgaagtcacttgttttgttgttggaggtgaagtgctatactctggttctgtcgataaaacaataaaggtgtgggatctcaacaccttgcaatgtagaatgaccctgaagcaacatatcggcactgtcacttcactcttatgttgggacaagtgtctgatatcgtcttccttggatgggaccataaaactttgggcttgttctgaaaatgaaagtttgaaagttgttcaaactcgcaaacaagaactgagtgttcatactctctgtggaatgcacgatgcagaggccaaaccgatcatgttttgctcttaccaaaatggagcagttggcattttcgacctaccatcttttgaagaaagaggaaagatgttctctacgcagacgatctgcacacttacaattggtcctggaggattgttattcagtggagacaagagtgggaacttgcgtgtatggagcttagcttctggcaccaaagtttag

SEQ ID NO: 2785 - DNA, 1611 bp, Arabidopsis thaliana
  Clone ID: AT_F5G3.C1.o6.tg
atgaatttcacagaatcaatgaacgttgtgcacgccagaatccaacaacttgaaccagagaatgcagcaaagatctttggttatctcttgttgatgcaagaaaatggcaaccgcgacatgatccgtctcgcgttctgtcctgattctgttatgtgttctgtcatcaattgcgttaaatacgagttagctaggaattctcatcattaccacagccctccttctgatcacattcctactcccaaatttggatcattcaccggttcatcgcctctttcggtttcggtttctcctcccatgaaaaccggtttttgggagaattcaaccgagatggataccttgcagaacaatcttcagttcttgaattttgaggatcctttgaccagccctgaattctctaacgggttcttctctcaagaacgtcaatgtttgcctttgcgaactagccgaagatccccgagtttacccgagttcccggtaaaaatctgccattacttcaacaaagggttctgcaaacacggcaacaactgtaggtacttccacgggcagattataccggagagggagagttttgctcagatgtttaatccaaacaacaacctaagtgacgaagagcatgttgtttcccctgtatctcttgagaagctagaaggtgagatcattgagttactcaagttaagaagaggagctccaatctccatagcttcattgccaatgatgtactacgaaaaatacggtaggactcttcaagctgaaggatatctcactgagtcacaaagacatggcaaagctggctatagtctcaccaagcttcttgctcgcttgaagaacacgattcgcctcgtcgacaggcctcatgggcaacattcagttatattagcagaggatgcatcaaagtttgtggaatacactggagagagaaatgaacatggagcaatccttgctggttctagacagatttacttaacgtttccggcagagagtagtttcactgaacatgatgtctcaatctacttcacctcatatggacatgtggaagatgtgaggattccttgccagcagaaaagaatgtatggatttgtaacatttgcttcctcagaaacagttaaacacattcttgctaaaggcaatcctcatttcatttgcaatgcacgtgttctagtcaagccttaccgggaaaaatcacgctctagtcgatacctcgacaattacaagcctctacacggcatgcgatatggctctaaatttattgagagagacatagagatgaacacattgccaccgcgggttagtgagagctcaagaatgaggaagccatttcttagtgagcctgaacaatcagtttctaagtccttacctactaattactcctacctcggcttctcctcggatgacttcaagttaacatcaaatgcggagcaagaggaacaagcagaacggttgagctacctactggactatttgaacacggaagataatgtcatgaacataaccactaactacagagacaatgatcggagaactcattgtgaatcgttggacagtcaagtcctgaatctacccgagagtccgttttcttccctttcggggaaggagatttcaacggttacatag

SEQ ID NO: 2786 - DNA, 723 bp, Arabidopsis thaliana
  Clone ID: AT_MPH15.C1.o13.tg
atggatgctcgtaagagaggacgccctgaagctgctgcctctcacaactccaatggcggattcaagaggtctaagcaagagatggaatcaatttcaactggtttaggaagcaaatccaagccatgcactaaatttttcagcacttctggatgtccatttggtgacaattgccacttcttgcactatgtgcccggtgggtacaatgctgcagcgcagatgacaaatctccgaccaccggtttctcaagtttccagaaatatgcaaggatctggtggtcccggcggcagattctcagggagaggagatccaggatcaggccctgtttcaatctttggtgcttctacttccaagatcagtgtagatgcttctttagccggtgccatcattggaaaaggtggaatccattccaaacagatatgccgtgaaacaggagcaaaattatcgattaaagatcatgaaagagacccaaacttgaagattatcgagctggaaggaacatttgaacagatcaatgtagcgagtgggatggtgagagagcttatagggaggcttggatcagtgaagaaacctcaagggattggtggtcctgaagggaaaccacatcctgggagcaactacaaaaccaagatctgtgataggtactctaaagggaactgtacatatggagatagatgccattttgctcatggtgaatctgagctgcgcaggtcaggaatcgcttag

SEQ ID NO: 2787 - DNA, 954 bp, Arabidopsis thaliana
  Clone ID: AT_MBK21.C1.o4.tg
atgcaaacaagaacatgtaaatttggagaaagctgcaggtttgatcatcctatttgggttcctgagggcggaatcccagattggaaagaggcaccagttgttccaaatgaagagtatcctgagagaccaggagaaccagattgtcctgttagtgttgaaactcaagattcattgcctgagaggccttctgaacctatgtgcacattctacatgaagactggaaaatgtaaatttggtttgtcatgcaaattccaccatccaaaggatatccagctaccatcatcgagtcaagatattggtagcagtgtggggttaaccagtgagcctgatgccacaaacaatccgcatgtcacatttaccccagcattgtatcacaactcaaaaggactacctgttagatcgggtgaagtggactgcccattctatctcaaaacgggaagctgcaagtatggagccacttgtcgctacaatcatcctgagaggactgcattcattccccaagctgctggggtaaactattctctagtttcatcgaacactgcgaatttgaaccttgggctggttacaccagctacctctttctatcagactcttactcaacccacgcttggagtgatttcagcaacttatccccaaagacctggacaatcagaatgtgactactacatgaagacaggggagtgcaagtttggagagagatgcaaattccatcacccagcagataggttaagtgcaatgaccaaacaagctcctcaacaaccaaatgtaaagctgagtcttgcagggtatcccagaagagagggtgcgcttaattgcccttattacatgaagacaggaacttgcaaatacggggcaacatgcaagtttgaccatcctcctccaggtgaggtgatggctaagaccacttcagaagccgatgctgctggagcaaccaacaccgacactactcaatga

SEQ ID NO: 2788 - DNA, 891 bp, Arabidopsis thaliana
  Clone ID: AT_T22C5.C1.o2.tg
atggcggagcatttggcttcaatctttggtactgagaaagacagagtgaattgccctttctacttcaagattggcgcttgccgtcatggtgaccggtgctcgcgtcttcacaaccgtcctaccatctccccaacactccttctttcaaacatgtaccaaaggcctgacatgattacccctggtgttgacgctcagggccaaccactcgacccgcgtaagattcaggagcactttgaggatttctttgaggatctttttgaggagcttggaaagtttggcgagatagagagcctcaacatttgtgacaaccttgctgaccacatgattggcaacgtatatgttcagtttaaggaagaggatcaggctgcagctgctttgcaggctctgcaaggtaggttctattcaggacgtcccatcattgctgatttctctcctgtgacggatttccgcgaagccacgtgtaggcagtatgaagaaaacaactgcaaccgtggtgggtactgtaatttcatgcatgtgaagcttgtttcgagggaactaaggagaaaactctttgggagatatcggcgatcataccgcagaggaagtagaagcaggagcagaagcaggagtattagccccaggaacaagagagataatgaccgacgtgatccttctcacagggaattcagtcatcgggacagagatcgcgagttttaccgtcatggaagtggaaaaaggagcagtgagaggtcggagaggcaagagagggacggttcaaggggtaggagacaagcaagccctaaacgaggagggagcccgggtggcgggagggaaggaagtgaggagaggagggcaaggattgagcaatggaacagagaacgggaggagaaggaagagggaggagcataa

SEQ ID NO: 2789 - DNA, 2553 bp, Arabidopsis thaliana
  Clone ID: AT_T1B3.C1.o3.tg
atggaaacatcatcaatcgaaatcaacgagcttccattagccaccaaaacccaaacacctcctgcttccgtcgagccaattccaatggagacatcatcaatcgacgagcttccatcgtccgattcgaatgcaacggataacattgaagctgttggtgagaaacggaaacgcgccgatgaagacgagaaaaccaatctcgaatcgtcagacacgaagattactactccttcaccgtggtggaagacgagtctctgttcttactttaggcgtgaggcttcgtgtagtcatggaaacgaatgtaaatacgctcacggtgaagcggagctccggatgaaaccggataatacttgggatccgacttctgagcgtggaaagaaagccaaggctatgaagatgtctgagcatgaagagaaagaagaagacgaggttttgtttactgagcagatgatggaatcaattgatggtgatgaaggaggtggtggtagtgttagtgttgttgatttgtcactaagtaaatgtttggtgcatttacctaataaatggcaatctgatgaattgaagaaatttttaggagaacagggagttctatataagtctgcaaagaaaagaagaggaatgattgttggttttgttacatttgagaatgcagaacaattgcagagtggcgtggagagaatgttgtatcgtaatgtgtttaatgtattgcagattttggatggaaaaactgttaatagcagtaatttgaagattgctgatgttcttccgcgtacatttgacaagaatgatgcaagaaaatcggttaaaagtgctcgtgacgctgtgactcccttggcttacttgtcttatgctgaccagcttgaacaaaaaaagacttctataggccaaatgctgaaaaaacttgtgaggagctttgtattcttgtttgaattggtgcgaggaatgcgcgtaaagcttgtccaaatgggaattcacttccacaatgggtccttacatcgagagacagagggcattatagaatcaccgattacaaatggctacaggaacaagtgtgagttctcggttggattatctcttcaggggaagccaactgttggattcagtctaggaagtttttgtgcgggtgtgacagcagtcgaggagcctgtggattgccccaacgtctccaaaattgcttctcaatatgcttcaatatttcagaagtttatagaaaattcaaaattccaagtttggaataggtttcaacatagtgggttctggcggcaattgacggttcgagaggggagaaaacccggcgtgttttcaaatgatgaagatgctattacaagaatcgcggaggttatgcttatggttcaggtttgtgtcttgaatggtaaagtggccactgagtttgaagaattggcgaaagcgtttgctgaaggagctagagcaagctctcctactcttcctctgactgtattagttgttcagaatcactcaggaatatcaaatgttgcaccacctgatgctccactgcaagtgctggctattccaatttcagataatgggacagatcaggagcaaaccaccaatgtcttgactgaagctcggattcatgatcacattaacaaccttcggttcagcatatccccaacagcattttttcaggttaataccgtcaccgcagagaagttatactcaattgctggagactgggctgaccttggtcccgacactttgctcttcgatgtatgctgtggaactggaacaattgggcttacactggcacatcgtgttggcatggtaattggcatagaaatgaatgcttcggctgtagcagatgccgaacggaatgcaacgatcaatggcataagcaactgcaagttcatctgctcaaaggcatgcattttgacagtaacatatttcgtagttggttccattgtcttaatctgtcttcatggtagttctgttggctttgttgtacaggcagaggatgttatgagctctctacttaaacagtacctagatgtgactcaaatggaagaagctaagcctctaagtaatgctaacgatgatctcaacaaacaaattccctcaacagaagaaatgacaaactcagagcatgtagctgatcaaaacctacctccttcaaacactcaagtggaagaacttcaagacaatgagcagaaggattcctcgtccttagaaccggaaaaaactacaaaaccacagttcaaaaatgtggttgctatagtcgatccacctcgctctggacttcatccagctgtaatcaaagctctaagaacccatccccggttaaagagacttgtgtacatttcgtgcaaccctgaaacgctagtggcaaacgcgatagagctttgcacgccatcttttgatgaaccggatagaggaaacaaaaattacagagggcgcaagaaaataggcattgccgctttggctcgacatagagccaagtcaatgccaacttctgaggcttttagacctgtcaaagcaatggccgttgaccttttcccccacactgaccactgcgaaatggtaatgctccttgagaggtaa

SEQ ID NO: 2790 - DNA, 2274 bp, Arabidopsis thaliana
  Clone ID: AT_F14N23.C1.o20.tg
atggagcaagcaaacgaaaaggaagaagaagagcgacacgaagaagcggcgggagagaaggaaagttttgaagagagtaaagagaaagcggcggagatgagtcgtaaggagaagcgaaaagcgatgaagaaattgaagaggaagcaagtgaggaaggagattgcggcgaaggagagggaggaagcgaaggctaagttaaacgatccggcggaacaggagagattgaaggcgattgaggaagaggatgcgcggaggagagaaaaggagttgaaggactttgaggagagtgaaagagcttggagagaagctatggagatcaagaggaagaaagaggaggaagaggaagcgaagcgggaagaggaagagaggcgttggaaggatctagaagagttgagaaagcttgaggctagtgggaatgatgagtgtggtgaggatgaggatggtgaatatgaatatatcgaagaaggacctccagaaattatattccagggaaatgagatcattctcaaaaagaacaaagtgagagttccaaagaaatcggttgttcaggtcgatggacacgagagttccaatgcggagtttgttttgcagatttctgacaggcctacttcaaatcctctacctccgggaagtgaagcttcagccaattatcagaatgttagttctgcgcaacagatattggagagtgttgcacaagaagtacccaactttggaactgagcaggataaagctcattgtcctttccatttgaaaactggagcttgtcggtttggccagcgttgcagcagagttcatttctaccccaataaatcgtgcactctacttatgaagaacatgtataatggtcctggtattacttgggaacaggatgaggggcttgagtatacagatgaggaggctgaactctgttatgaagaattttatgaagatgttcatacagagttcctaaagtatggagaacttgttaatttcaaggtgtgtagaaatggctcattccatttgaagggcaatgtatatgtccactacagatcactagaatcagctattcttgcttaccagtccattaatggtcgatactttgcgggtaaacaggtgaattgcgagtttgtcaacatctcaagatggaaagttgccatatgtggggagtacatgaagtccaggcttaaaacttgttctcgtggatctgcctgcaattttatccattgtttccgaaatcctggtggagactatgaatgggctgaccatgacagaccacctccaagattctggattcacaaaatgacctctttatttggttattcagatgaaaagcacatggaacatgaatcttcagggtcgttaaatgattcaatatcagatctatcaacagattcacacaggcaaccttcaagaagatctagatcgagggaccatgatcatgctaatgttggatctacgccttcttataggagccgtaaatatcatggtgatactcaggacagcactcgtgaagacaagcttcgcaggcatgccgagaactgtcatgatggtgatgacagtccgagcagagatggtagtttagagagggagatgtataaagagcgacggtatgctaaggacacattgcatcgtgatagcagatggtctgaacactctcctggacatcgggtgggaaggaagagaatccatgggaggtattctgatgatgattctgctgatggagatgactatggtaggagagggacgggtcacaaacgaaaacccagaagagggacagattcaggagtacaagaacagatggacaatgaaaaggacagaaaaacccacaggagttcaagaaaacacagcagggaagggtcatcagctgataaagaggagggtcatgaacatgatagggttcatacagtttctgacaagtcgcatagagaaagatcgaagcatcgacatgaaagaagtagctcaagatattcacacgaggaagattcaactgagagtagacatcatcagcacaaagaatcagacaagaagagaagtgtagagactagtcccgtaggatatcagtcagataaagatagggacagaagcaaacagagacagagatacaagagcgatgatccagagtctgatcaaagcaggaaaggaaaacgacaaagtgaagagaattcagatagagaaacacacaaagagagacgtcatcgccatagaaaaagaagacggacacaaaactcagacgaccagaatcctaaggaatcagaggaagtggaagaagagattgagcgttggagaccagtgtga

SEQ ID NO: 2791 - DNA, 1662 bp, Arabidopsis thaliana
  Clone ID: AT_F17A22.C1.o24.tg
atgacggatgtgtccccactttcggaccagaccactttactccccgagttagcaagtgaagtgagaaaactgtctgtgtgtcacatgttggccactcgcgcgctatccccgcccaaggaccttaccgtcattttggttggaaactatttggtgagaggagtttttactagtatcttttttactgtacaccaaatccctaaatttaaggacatgtatgctcgcaatcctcccctcaatggctcacaatctgctcaagctcccgactggacccctgcagatgccgataccggactccaaggtctcgcatgcgctttgattctcagcaactggttgggtagcgactcgtaccctgagagaccaggtgctcctgactgtgcctactacatgcgaactggtgtctgtggctacggtaatagatgtcgttacaatcaccctcgcgatcgtgcctcggttgaagcaactgttagagctaccgggcagtatcctgaacgttttggtgaacccccatgccagttttacttgaaaactggaacttgtaaatttggggcgtcatgcaaattccaccatccaaagaatgcaggtggatccatgagccacgttccactaaatatatatggataccctgtacgagagggtgataacgaatgctcctactatttgaaaacggggcaatgcaaatttggtataacctgtaaatttcatcatcctcagcctgctggtactactgtcccaccaccaccagcatctgcacctcagttttatccatcggtgcagtcacttatgcctgaccagtatggaggtccatcttctagcttgagagttgcaagaactcttcttcctggttcttatatgcaaggcgcctatggtccaatgctattaacccccggggtcgttcctattccaggctggagtccttactcgtctcttactgtctcacttttgcttttgcttcaggcacctgtgagccctgctctatctcctggtgcgcagcacgctgttggggcaacttctttatatggagttacacagctcacttccaccactccttcgcttcccggggtttatccatctctgtcctctcctacaggtgttatacagaaagaacaggcctttccagagagacctggtgaaccagagtgccaatactatttgaaaacaggagattgtaagtttggaacatcttgtaagtttcatcatcctcgagatcgggttccaccaagagcgaattgcgtcctcagccccattggtcttcctctacgcccgggtgtgcaacggtgcactttctacgtacaaaacggcttctgtaagtttggatcaacatgtaagtttgatcatccaatgggaacgatcagatacaatccttctgcgtcctctctagctgatgcaccggtggctccttacccagtgagctctctcttgggtgctctggcagctgccccttcttcttcatcgacagagctcatagcaggcggtgcaaaagatgcttacatgaccggtgtgcctacatcaagaagcacatcaaacatctcggcaggtttgattttctcccagagcggtgggtcaattccattctcagagctgcaactctcgagccagagctctcttcctctaacaggtagcagaatcacaagacaagggcgtgaaattcgtcgatccttttga

SEQ ID NO: 2792 - DNA, 933 bp, Arabidopsis thaliana
  Clone ID: AT_F4N21.C1.o6.tg
atggagaaactcgcggcgtctactgttacagatctagcttgcgtaacggcgataaactcatcgccgcctccactatcaccgatctctgaacaaagcttcaacaacaaacaccaagaagagttcgccgcaagcttcgcatcactctacaactcaatcttctcaccggaatctctctctccttctcctccgtcctcttcctcaccaccatctcgcgtcgatacaactacagagcatcgtcttcttcaagcgaaacttatcctcgagtacgacgaactcaacgagcattacgagctttgccttaaccgtcttcaatctctaatgacggaacttgactctcttcgtcacgaaaacgattctctccgctttgaaaactcagatctactcaaacttattcgtatctctacttcatcctcctcctccgtctctcctccggcgccgatccataaccgtcaattccgtcaccagatctccgattctcgctccgcgaagagaaacaatcaagagagaaactcgttgcctaagagcatctccgtcagatctcaaggatatctcaagatcaaccatggatttgaagcgtcagatctccaaacgagtcaactcagctctaactcggtgtcttcttctcaaaaggtgtgtgtagtacaaacaaaaggggagagagaagcattagagcttgaggtatatcgtcaagggatgatgaagacggagctttgtaacaaatggcaagagactggagcttgttgttacggcgataattgccaattcgctcacggaatcgacgagctacgtcctgtgattaggcatccacgctacaaaactgaggtttgcagaatgatggtcaccggagctatgtgtccgtacggtcaccgttgccatttccgtcactcacttactgatcaagagaggatgatgatgatgatgcttactcgctga

SEQ ID NO: 2793 - DNA, 1347 bp, Arabidopsis thaliana
  Clone ID: AT_T29H11.C1.o40.tg
atggtcaattccgaagaaattgcagatgggtttgagccaaaacctgtttctcgatcttattctggtgattcatctcatgatcgttctctttccgatctcaatcacgcagcggaggacttgagtgataagcttaagaatgtgggtttgaatgaagttacgaaagagcagagtgagaagatgatgagtgtctctgagagtaatggaggtttagattcgaatgcagtagtcaccatcaatcaggaagaagaagaagaagaagaagacagagatggttatggttatggtgatggttggagcgagaacgagagtgagaatgtgtatccagtgaggccaggagcagaggattgttctttttatatgagaacagggagctgcaaattcggatccagttgcaaattcaatcatcctcttgccagaaaattccaaattgctagggataataaagtaagagaaaaggaagatgatggtggtaaattggggctgatagattgcaagtattactttaggactggagggtgtaagtatggagaaacttgtagattcaaccataccataccaaagtctggtctggcctcagcacccgagcttaacttcctcggccttcctctcagaccgggagaagtagaatgcccttactacatgcgcaatggctcctgcaaatatggagctgagtgcaaattcaatcatcctgatcctacaaccatcggaggaactgactccccatcatttcgtggtaataatggtgtatccattggtacattttctccaaaggctacattccaagcaagttcaacttcctggtcttcaccaaggcatgtgaatggtacatctccttttattccagtcatgctgtcacaaactcatggggttacatctcaaaatccagagtggaatggctatcaggcttctgtgtattcatctgaaaggggtgtgttttctccttccaccacatacctaatgaacaattcatcagctgaaacaagtatgttgctgtcacaataccgacatcaaatgcctgctgaagaatttccagaacgtccagaccaacctgagtgcagttattatatgaaaactggggactgcaagttcaaattcaattgcaaataccaccatcctaagaatcgtctgccgaagctgcctccttatgctctcaatgacaagggtttaccccttagacctgatcaaaacatttgcacatattacagtcgatacggcatctgcaaattcggtccagcttgtagatttgaccattccgtccagcctccatattcgacagaaagctcccaggccattgtagaacctcctcaggtcagtgcaaatgggaatgaaagtgacggttggaattga

SEQ ID NO: 2794 - DNA, 747 bp, Arabidopsis thaliana
  Clone ID: AT_T21B14.C1.o106.tg
atggatactcgtaagagaggacggcctgaagctggctcattcaactccaatggcggcggatacaagaagtctaagcaagagatggaatcatattcaactggtttaggaagcaaatcgaagccatgcacaaaatttttcagtacttctggctgtcctttcggagagaattgccatttcttgcattatgttcccggaggatacaatgctgtatcgcagatgacaaatatgggaccacccattcctcaagtttccagaaacatgcaaggttctggtaatggaggccgattctcagggaggggagagtctgggcctggccatgtctctaactttggtgactcagccactgccagattcagtgttgatgcctctttagccggtgcaatcattgggaaaggcggagtcagttcaaagcagatatgtcgtcagacgggagtaaaattatcaattcaagatcacgagagagacccaaacttgaagaacattgtgcttgaaggaacacttgagcagataagcgaagcgagtgcaatggtaaaagatttgattgggaggcttaattcagcagctaagaaaccacctggtggtggtcttggtggtggtggtggcatgggttctgaagggaaaccacatccagggagcaacttcaagactaagatatgtgagagattctcaaaaggaaactgtacatttggtgatagatgtcactttgctcatggggaagcagagctacgcaagtcaggaatcgtctag

SEQ ID NO: 2795 - DNA, 543 bp, Arabidopsis thaliana
  Clone ID: AT_T32F12.C1.o19.tg
atgagtcatcggcgagattacggcagtgatgcagttcacgtgagaatcacccacgaccctccgcctgagaattgttttccaaattccggcgacagttccgtctgggccactgaggatgattacagccgtgtctgggccataaactctgatggcgcagagtctccgagcaagaagacacgatcttcctcctcctccgagatcgggaaatcgttcttcaagacgaagctttgcttcaaattccgcgccggaacttgtccctactccgcgagctcttgccactttgctcacagcgcggaggagctccgtcttcctccgccgccgccgcccaattggcaggagacggtgacagaggcttcaagaaacagagaaagctttgcggttagtttaggccctcgtggcaatgttgctcagactctcaagtctccgaattggaagacaaggatttgcaataagtggcagactactggctattgtccttttggttctcactgccattttgctcatggaccttcaggtaaagctacggcctttttcatctattag

SEQ ID NO: 2796 - DNA, 1314 bp, Arabidopsis thaliana
  Clone ID: AT_F24P17.C1.o12.tg
atgcgtgtttttgtagctccgatgtggcggttagggttgagcggcggcggcggaggtggaggaggtggagaatcgtacccggagagacctgacgagcctgattgtatttattacttgagaaccggcgtttgcgggtacgggtcaagatgtcggtttaatcacccacgagatcgtggagcggttattggaggtgtgagaggagaagctggagctttaccggagaggatgggacatccggtttgtcagcattttatgcgaactggtacgtgtaaattcggtgcttcttgcaagtatcatcatcctaggcaaggaggtggtggtggttccgttgcgcctgtctcgctaagttatttgggatatccattacgcccgggagagaaagagtgctcttattacttgagaaccggtcagtgtaaatttggtttgacttgtagattcaaccatcccgtgccactcgctgtacagggtccacctcagcagccgcaacagcagcagccacagccacagccgcagctacagactatttatccgacacttcaatctcaatctattccttcgtctcaacaatatgggttagttttgactaggccttcttttttaactggttcatatcttcaaagcccttacggtcctccaatggttctgcctcctggaatggttccatactctggttggaatccttaccaggcttctttaagtgcaatgccttcgcctggaactcaaccgtctattggatcaagctctatttatggactcacgccgttatctccttcagcgactgcatatacaggaacatatcaatctgtgccttcttcaaattccacctcaaaagagtttcctcagcgacctgatcaacccgagtgtcaatacttcatgagaactggtgactgtaaattcggatcttcgtgtcgataccatcatcctgtagatgcagttccacctaagactggcattgtcctcagctccattggccttccacttcgtcccggcgtagcgcaatgcactcactttgctcaacacggaatctgcaagtttggaccggcgtgtaagtttgatcactcaatgagttcttcgcttagctacagtccgtctgcatcatcactaactgatatgcccgtggcgccatacccaatcggatcatcctcactcagcggctcatcagctccagtaagctctagcaatgaacccaccaaagaggctgtgactcctgcagtttcttctatggtcagtggcttgagccgtcctgagccagctgagacgagtggtgactcagccagcgtcagtggcagcatagaagctaagacttcaagttaa

SEQ ID NO: 2797 - DNA, 1248 bp, Arabidopsis thaliana
  Clone ID: AT_MLD14.C1.o8.tg
atggattcgagttactctgattctcgtcccatgttcgtgcaatcaccttatggtggttggaatcaaacacagatgattgattcaatggctaatccaatgaacaatgaacaaggagacttgcattcactatctgaatcacaatcacaatctcaaccgtctcagcaattacagcctgcattgaaaaggcctagacttgttgatgataacttgtttaatcctgcttcgtcgtttcctcagccttcgagtagcaatccttggatggttccatctttgaaccctcctcctgtgaacaaagggactgctaatatattctataagactagaatgtgtgctaaattcagggcagggacttgtaggaatggtgaactctgtaattttgctcatgggattgaggatttgaggcagcctccgtcgaattggcaggaaattgttggacctcctcctgctggtcaagacagggagagggagagagagagggaaagggagagggaaagaccgtctttggcgcctgttgtgaataataattgggaagatgatcagaagataatcttgaggatgaagctttgtaggaagttttgttttggggaagagtgtccttatggggacaggtgcaattttattcatgaggatctgtcaaagtttcgtgaggactcggggaagttgagagagagctcggttataagtgttggtgctactgctgctgatcaaccatctgatactgcttctaatcttattgaagtaaatagacaaggaagcatcccggtacctgcacctatgaacaatggtggtgttgtcaagactgtgtactggaagacgaggttgtgcatgaagtttgacatcacgggtcaatgtccttttggcgataagtgtcactttgctcatggccaagcagttctgtgtatacaggctatctctgaattctcttcttttgaccgacatttgtttgatcttgatttggttgttgattacgaaattgcagagttgcataactctgttggaagggtagaaggagaagctatgaacgcggtagcgtctgtgaataaacaagcagtggtacctgcgaatgaagcatttgcaatgaaaccgattacacaagtaacagcagattcctctggtctgaatgaagaagggcggcgaaagaagtgtttgctcaagtggagcgactccaagaagattaaccgaatatatggagactggatcgatgatttaccggtgggtcaaaagtcgacaaagccagtagagagttga

SEQ ID NO: 2798 - DNA, 1362 bp, Arabidopsis thaliana
  Clone ID: AT_T21L14.C1.o13.tg
atgtcggaaactcagcagcaggttcagaactctactgggtcgattcgatctcccgacaaaattgaagataccttcaggaggatgaaagttaatgaagacaatatggagcaatctagtccatatcctgatcgtcctggtgagcgagattgccagttctttctgagaactggtcagtgtggctatggaaactcttgtcgatacaatcatcctcttactaatcttccacagggtattatttattacagagaccaattgcctgagagagttggacagcctgactgtgagacaggagcctgtaagtatggcccaacatgtaaatatcaccaccctaaagacaggaatggtgctggacccgtgctgttcaatgttctcggtttgcctatgcggcagggtgagaagccatgtccatattacatgcagacaggattgtgtcgattcggagttgcctgcaaattccatcatcctcatcctcattctcagccttctaatggccactctgcatatgcaatgtccagctttccgtctgttggttttccttatgccagtggaatgacaatggtgtctttgcctcctgcaacatatggagctattccacgtcctcaagttcctcagtctcaggcctatatgccctacatggttgcaccctcccaaggccttttacctcctcaaggctgggccacttacatgactgcatctaaccccatttacaatatgaaaactcaactcgactccagttctagcgcatcggtggctgtgaccgtgacatcacatcatcacagtttttctgaaagagctgaatgtaggttttttatgaacactggaacttgtaaatatggtgatgattgcaaatacagtcatccgaaagaaagattgttacaatcaccaccaactctcttgaaccctattgttcttccagcaagaccaggacagccagcatgtggtaacttcaaggcctacggattttgcaagtttggagcaaactgcaaatttgatcactcaatgctgctaaacccttataacaatacgggcttggccatgtcttctctgcctactccttatccttatgctccacctgtttcaactaatttgaggatctcatcgccaccaagcccctctgatatgactaccctatccaatggtaaacccgctgctgcagaagctcaaagcttggagactgagaaacaagacgatagtccaacagaaccagaaaaatcagaagtggaggactcattgccaccaaacggctctgattcaacctccctgcccaatgataaacctgatgcagagactgagaaacaagacgatgattctgcagaactggacagctcaaaagtgcaggattcatctgataaatctacatga

SEQ ID NO: 2799 - DNA, 1308 bp, Arabidopsis thaliana
  Clone ID: AT_MDC12.C1.o23.tg
atgagcaagcccgaagaaacttccgacccgaacccaaccggacccgatccgtctcgatcttcctccgatgaggtcaccgtcaccgtcgccgatcgggctccgtctgatctcaatcacgtttctgaggagctaagtgatcaattgaggaatgtgggtttggatgattctgcgaaagagctgagtgttccgattagtgtccctcaaggtaatgtagaaacggattcgagggcattattcggcagcgatcaaaaggaggaagaagaagggagcgagaagagaatgatgatggtgtatccagtgagacctgattcagaggattgttcgttttatatgagaactggaagctgcaaatacggatcaagttgcaagttcaatcaccctgttcgcaggaaacttcaaattggtagggagagagtaagggaaagagacgaggatgtggagaacccaaagctgatggagtgtaagtactactttaggactggagggtgcaaatatggagagtcttgtagattcagccacatgaaagaacataattctccggcctcagtaccagagcttaacttccttggccttcctatcagaccgggagagaaagaatgcccgttctacatgcgcaatggctcctgcaagtttggatcagactgcaaatttaatcatcctgatcctacagctatcggaggagttgattctcccttgtaccgtggtaataacggtggatccttttccccaaaggccccatcccaagcaagttcaacttcttggtcttcaacgagacatatgaatggtactggtactgctccttttattccatccatgttcccccatagtcgtggagttacacctcaagcttcagactggaatgggtatcaggcgtcttctgcctatccaccagaaaggagtccacttgctccttcctcataccaggtgaacaattcattggctgaaactagttcattctcacaataccaacaccagatgtctgttgaggaattcccagaacgcccggatcaaccagagtgcacttattatcttaaaactggggactgtaagttcaaatataaatgcaaataccatcatccgaaaaatagattgccgaagcaagctgcattctctttcaatgacaagggcttgcccctaagacctgatcagagcatgtgcacacactacagccgatatggcatctgcaaatttggtccagcttgtagatttgatcattccataccgcccacattctcgcccagcagctcccaaaccgtagaagctcgtcaagttggcgctaacggaaatgaagatgacagctggcattga

SEQ ID NO: 2800 - DNA, 2496 bp, Arabidopsis thaliana
  Clone ID: AT_K9D7.C1.o13.tg
atgggagatggagatgagcaaagtaaagagttaggaggagtttcgtcttcgagtcgtcgttgttcttccggtactgctggtgctgcaaatgcagaagcaagaatgaagtttgctgctgttgatgctataacagaattagtgtggtctcctagcaacggtctaagcttaagatgtgcagatatcagtttcacgggaaaggcaaaattactctctcctaacttctttgatataggactaactaacatggcgattcactcaaatagcacaagtattgaagaccaagaagatcacgtagatgtcgaattgagaaaccgagatcaagtgaaccaagcaatgattggtggttctgttgaggatatgaaacctgaaatggttgaggataaggttgaaaccaatgatgatataaagaatgaagaagcaggatgttccaaaagatcttcagatagtccgaaagctatggaaggagaaaccagagacttgttggttaatgaacagttgaggatggaaagtgctggatctcaagaagaaggggataaggcgcataatagagttgatcgtttagaatcaatggatgagaacaacctcgcaactcttgctgttgtagcatgtgaaggtaaaggggactatttgccggagggtgaggctggacctagtggttcctacaggcgtcgtgagaaagcaaaagggaaagagaaagctttatctgatgaaaactttggtggtgatggtgaagatgaggatgaggagagttttggtagtgtagaaagttgcaatagtgcgggtttgctctcaaggggaaagaaaagaccaggctttgaggagcagctgatttttggaagcaaacggctcaaaacgttaaatcaagaatgtttggggtcaacttcaaagctcaagcaagatagttccttcatgaattggatatcaaatatgactaaaggaatctggaaaggtaatgaagaagacaattctccttttgtagctcttaccaccacctcaaatgctaatggtcatggccaagtcaatgccatcgttgaccaacaacaattgagtccatgctgtgtgaaggaaaatagtggatgcagaaacaccggtttccagtcttttttccagtctatatattgtccgaagaaacaaagtcaagatgtcgtcgacatggatttcccgaatgatgttaatgctgctcctttgcaggaacttccctggattcctgaacattgcgacatttccaaaggggatgacttgtcttcatctggtaatgagattggtccagtggctgaacccaacatttcatcaggaaaagttgtatttaatcagacaagcaaaacacagtcttcagagaacaaacgtgaggacaaagagccaaacatctcgttgatgtctcttagtaagtctaagccaaatgaagagccaaaaacatgcggtgaagctgatggaaaggttagtccatgtttaaccaacagaaactctggtcttaaaagtttgtggattagtcggttttcttctaaaggttcgttccctcagaaaaaggcaagtgaaacggctaaagaggccaatgcttcagcctcagacgcagctaaaacccgtgattcacggaaaatgctggcagacaagaatgttataagacccagtatcagctcggtagatgggcccgataaaccggacactgtccttcctatagtttcgtcaatgagaatagagtcttcagaagcaatggcttctttgtttgctagaagattagaagcaatgaaaagcatcatgccctcaggttctttagctgagaatgcagaggaggaacagagggatctaatttgtttctactgcggtaaaaagggtcattgtttacgggattgtttggaagtaactgatactgagctcagagatctagtacagaacataagtgtgcggaatggaagagaagaagcgtcaagtctatgcattagatgttttcagcttagtcactgggctgcaacatgcccgaatgctcccctgtatggttcaggagctgaaggtagagctatgaagaacgctttagcttctacctctggcatgaagctgcccataagtggtttcacagacgtaccaagggcggtctttgatgctgttcaagtgcttcgcctgagccgcacagacgttctcaaatggataaacaccaagaagtctgtatcgggtctcgaagggttcttcttgcggttaaggctcgggaaatgggaagaagggcttggaggaacagggtattatgtagctcgcatagatggggacacagagggacaaagctcaaggagacattcagagaaaagcttaatttcagttaaggttaaaggtgtgacttgccttgttgagtctcagtttatctcaaaccaagactttcttgaggaggagttaaaggcctggtggcagagcgcggggaaaagtgccagaacaagcggctacgacggcatcccgtcggcggaggaacttagtcggaaaattcagcagagaaaaatgttaggcttttag

SEQ ID NO: 2801 - DNA, 3927 bp, Arabidopsis thaliana
  Clone ID: AT_T6K22.C1.o90.tg
atggcgatgtcaacgaaggtggagatcaagacctttaatggcgatcgcgacttctctctgtggaagataagaatcgaagctcagcttggtgttcttggattaaagcctgctttatcggatttcactttaaccaagacgattcttgtggtaaagagcgagaagaaagaatcagaatctgaagacgatgaaacagattcaaagaaaactgaagaagttccagatccgattaagtttgagcagtcagatcaagcgaagaacttcatcataaatcacatcactgatacagttcttcttaaagttcaacactgtgttactgctgcagaactttgggcaacattgaacaagttgttcatggaaacatcgttgcctaatcggatctacactcaactaaggctttactcattcaagatggttgataatttgagtattgatcaaaacactgatgaattcttgaggattgttgcagaattaggtagcctgcagattcaagtaggcgaagaagttcaagcaatcctgattcttaactcgttgcctccaagctatattcaattgaagcatactctgaagtatggcaacaagactctctcagttcaagacgtggtgtcatctgcaaagtcacttgaacgtgaactgtctgagcaaaaggaaacaattagagcacccgcatcaacggcactctacactgctgaaagaggcagacctcagaccaagaacactcagggtcaaggtaagggacgtggcaggtcaaactctaagagtcgtctaacttgctggttttgcaagaaagaaggacatgtcaagaaagattgctatgctggaaagagaaagcttgagaatgaaggacaaggaaaagcaggtgtgattacagaaaagttggtatactcagaagctttgagtatgtatgatcaggaagcaaaggacaaatgggtgatagattccgggtgtacatatcacatgacatctagaatggattggttttctgagtttaatgaaaatgagactactatgatcttgcttggtgatgatcacacagttgagtcaaagggaagtggcactgtgaaagtcaatactcatggtggatccatcagggtattgaagaatgtcaggtttgtaccgaatctaagaagaaatctaatctccactggtactcttgacaagcttggttacaagcatgaaggtggagatggtaaagtcagattttacaaggaaaacaagactgctttgtgtgggaacttagtgaatggcttgtatgtcttggatggacacactgtggttaatgaaaactgtaatgttgaaggatcaaatgagaagactgagttgtggcattgcaggcttggacacatgagtttaaataacatgaagatcttagcagagaaaggtctgcttgaaaagaaagacattaaggagttaagcttctgtgagaactgtgttatgggaaaatctaagaagctgagttttaatgttggaaagcacatcacagatgaggttttaggatacattcatgctgacttatggggaaaacagtattttctctccatcatagatgataaatccagaaaagtttggcttatgttcctgaaaacaaaggatgagacatttgaaaggttctgtgaatggaaagagcttgttgagaatcaagtaaacaagaaggttaagatactgcgaactgataatggtcttgagttctgcaatctcaagttcgatgagttttgcaagcagaatggaattgagaggcatagaacgtgtacctacactcctcaacaaaatggtgttgctaaaagaatgaatagaaccttaatggaaaaggtaaggtgcttgttgaatgagtcaggtcttgaagaagttttctgggctgaagcagctgctactgcagcctacttggtgaatagatcacctgcatctgctgtagatcacaatgtccctgaggaattgtggctcgacaagaagccaggatacaaacatctgagaagattcgggtgcatagcatatgtacatttggatcaaggaaaactaaaaccgcgggcactaaaaggtgttttcttgggatatccacaaggtactaaagggtacaaggtgtggctattggatgaagagaagtgtgtcattagtcggaacatagtgtttaatgaaaatcaggtgtacaaggatataagggagagcagtgaacagtctgtgaaagacatcagtgacttagaaggttacaatgagtttcaggtttcagttaaagaacatggagagtgttctaaaacaggtggagttaccatagaagaaattgaccaagagtctgattcagagaactcagtaactcaagaaccactcattgcaagtattgatctcagtaactatcagtcagctagagacagagaaagaagagcaccaaacccacctcagaagttggccgactatacccattttgctttggcattggttatggctgaagaaattgagtcagaagaaccgcagtgctatcatgatgcaaagaaagacaaacattggattaaatggaatggaggaatgaaagaagaaattgattcattactcaagaatggaacatgggatatagttgaatggcctaaagagcagaaagtgattagctgcaggtggttgtttaaactgaagccaggtattccaggagttgaagctcagaggtataaggctcggttagtagccagagggtttacacaacagaaaggaattgactatgaggaggtgtttgctccagtagtcaagcacatttcaatcaggattctcatgtcagctgttgtgaaagatgatatggagctggaacagatggatgttaaaacaacatttctgcatggagagcttgaccaagtgctttacatggaacaacctgaaggattcgaagtaaatccagagaaagatcaggtatgtttactaaagaaatctctatatggcttgaaacaggcaccaaggcagtggaacaagaagtttcatgctttcatgttgagtctgcagtttgctcgaagtgaacatgattcatgcgtttatgtgaaagaagttaaccctggtgagtttgtttatcttctactgtatgtggatgatatgttgttagctgctaagagtaagtcagaaattagcaagcttaaggaagctctcagtcttaaatttgaaatgaaagatatgggagcagctagcagaatacttggaattgatattatcagaaacaggaaagagggtactctgcgcttatctcaaacgagatatgttgacaaggtaatacaaagatttagaatggcagatgctaaggtagtgagtactccaatgggagctcacttcaagttaacatcactcattgatgagattggaagtgtggatcctgaagtggttccatattcaagtgcagtgggtagtgtgatgtatgccatgattggaactataccggatgttgcttatgccatgggtttagtaagcaggttcatgagtcgacctggagctaatctcgaagtacaagggtattgtgactctgatcatgcagcagacctagacaaaagaaggtcaatcagtggatatgttttcacagttggtggtaacactgtgagctggaaatcaagtttacagcatgttgtagctttgtcttctacacaggctgagtttattgcccttacggaagctgtaaaggaagcaatttggattagagggttactagaagacatgggattgcagccaaaacctgcaaccgtgtggtgtgactcgcagtcagctatttgtttgtcaaagaacaatgccttccatgatagaacgaagcatgtggaagtcaagttctacttcatcagagacatcatagaagctggtgaggtaaaggtcaggaaaattcacacttctgtgaatcctgcagatatgctcacaaagtgcataccagtaaagaagtttgaggaagctttggatgttctaaagctacaaaggtaa

SEQ ID NO: 2802 - DNA, 1191 bp, Arabidopsis thaliana
  Clone ID: AT_F14C21.C1.o12.tg
atgtccagtggcgattgcttccattgtcatcaaccaggccactgggccaaaaactgtcctctcaaaaccactacgaaacccaccgccgccgcagccccttctccgccggacattcactgtccctgcaacgccggaccttgcaacactgtgacttctaaaactgagaaaaacccaaacaggagattctacacatgcccaagctgtggatatttcaagtggtgtgatcaagtaagtatcaaatctgagccactctctgttcttcctacttgtccttgtggcgcagggccttgtaaaagagtaacattcattcatggaccaaacactcaacgttcttactttgcttgctgcgttaagaagggtttaggagattgtggattctttaaatgggaggatggtgagagtttgctacatgaaactgagttggactctgatggtaatgtgaaaaggaacagacttggagttgtggttgaattagaattgaatccagcttcatctagtgagtctaatactcttggaaacagaattgttgatactcttccagtgaatccagtcactgtgggaaaggaatcgattccggttttcgcaggtttcaacgatcaaggatcggtctccaacagcattgtcccttcatttgatttgattacactgtatgacgatgcggttcgccttgagacgaaagagccagtactcccttcagttgcccctaaacatcttgatactcaagtggagactttgtgtggtaatgcattggaggccgtagagagtagttctcagaacacaagcgatctagttttgaatgctaacaacaaacctgagcatatacatcaacgagctgcgacatctggtgaaaccgaggcctcatattcaggtagctcctccatgatggtacttattgagcaatataagtcagagaagctctatctcgagagtatatctatgaaacatgttgaggcgttgactgcctatacgggttcgtacaagcagttagagtcgcttcgtgatagagcacatagtcttaagaagcagttacttgaggtagagaaacaggtgaagctttgtgaggctgagacctcagagtttgcagcaagtgttcaagaagtttctggtgaaatggcgaaatcgcagaagaaaatggtggagatagctgggaaagtagctaaggaagtgagagttgacaagcaaagggattaa

SEQ ID NO: 2803 - DNA, 4092 bp, Arabidopsis thaliana
  Clone ID: AT_F9K21.C1.o100.tg
atgtctggagcaagaatagaggttgagaagtttgatggtcgtggggattacacgatgtggaaggagaagctcttagctcacattgatatgttgggcttaagtgctgttctaagggaatctgagacgccgatggggaaagaaagagattcagagaaatctgatgaagatgagaaagaagaacgagaaaagatggaagcttttgaagagaagaagagaaaagccagaagcaccatcgtgttgagtgtttcagatcgggttttgaggaagattaagaaagagacatctgctgctgcgatgctggaagccttggataggctctacatgtctaaagctctcccaaaccggatatatctgaagcagaagctctatagcttcaagatgtccgagaatctctctattgaaggtaatatcgatgaatttcttcatatagtagcagatttagagaacttaaatgttttagtctcagatgaggatcaagccatactgttgttgatgtctcttcctaagccgtttgatcagttaaaggatactttgaaatatagctctggtaagactgtattgtctcttgacgaagtggctgctgccatttactctagagagttagagtttgggtcagttaagaaaagtattaaaggtcaagctgagggtctgtatgtcaaggacaaggcagaaaatagaggaagaagtgaacaaaaggataaagggaaagggaagagatctaagtctaagtctaaacgtggatgttggatctgtggagaagatggccatctgaagtctacctgtcccaacaaaaacaagcctcagttcaagaatcaaggaagcaacaaaggagaatcctcaggaggaaaaggaaatctggttgaaggctcagttaactttgttgaatctgcaggaatgtttgtgtcagaagctttatcctctactgacattcatttggaagatgagtggataatggatacaggctgcatctatcacatgacccataagagggagtggcttgaagattttgatgaagaagcaggaggttcagtcagaatgggaaacaagtctatctcacgagtcaaaggagttggtacagtcaggattgtcaacgacaatggtctcactgtaacattacaaaatgtgagatacattccagatatggataggaacctgttatctttgggaactttcgaaaaagcaggtcataagtttgaatcagagaatggtatgttgagaattaaatctggtaatcaagttctgttggagggaagaaggtatgacacgctctacatactccatgggaaacctgcaactgatgaatcacttgcagtggctagagctaatgatgacactgtgttatggcataggaggctatgtcatatgagtcagaaaaacatgagcttgctgattaagaaagggtttcttgataagaagaaggtgtcaatgcttgatacgtgtgaagactgcatctatggaagagctaagaagattggcttcaacttggctcaacatgacactaaaaagaagctcgagtatgttcattctgacctgtggggggcacctacagtaccaatgtcactagggaactgccagtactttatatcattcattgatgactatacaaggaaggtatgggtttattttctgaaaactaaagatgaagcttttgagaagtttgtaagttggatcagtttggtggagaaccaaagtggtgagagagttaaaactctgagaacagacaatggtctagagttctgtaaccgaatgtttgatgggttttgcgaagaaaaaggtttccagagacacaggacctgcgcttacacgccacaacaaaacggagttgttgaacgcatgaacagaactattatggagaaagtgagaagcatgctatgtgactcagggctgcctaaaagattttgggctgaagccacacatacagcagtgctactcatcaataaaactccttgctctgcgattaactttgagtttcctgacaagagatggtctggaaaggcacctatatacagctacttgagaaggtatggctgtgtaacatttgttcatactgatggtggaaagttaaatctgagggcaaagaagggagttcttattggatatccaagtggcgtgaaaggttacaaggtttggctgattgaagaaaagaagtgtgtagtgagcagaaatgtgagtttccaggagaatgcagtgtacaaggatctgatgcagagaaaagaacaagtttcctgtgaagaggatgaccacgctgggtcatacattgatttagatcttgaagctgacaaagataacagctcaggtggagaacaatcacaagctcaagtcacacctgctacaagaggcgcagtgactagtacaccaccaagatatgaaactgatgatattgaagagacagatgtacatcaatctcctttgagttatcatctggttcgagacagagaaagaagggaaatcagagcaccaagacgattcgatgatgaagactattatgcagaagctctatatacaacagaagatggtgatgcagtagaaccggcagattacaaagaagctgtcagagatgaaaactgggacaagtggagacttgctatgaatgaggaaattgagtctcaactaaagaatgatacttggactacagtcacaagacctgagaaacagagaatcattgggagcagatggatatacaagtataagcaaggtattccaggagttgaagaaccaaggttcaaggcaagacttgttgccaaagggtatgctcaaagagaaggcgtggactatcatgagatctttgcaccggttgtgaaacatgtttcaatccgaatcctcctttcaatcgtggctcaagaaaatcttgaattggagcaactggacgtcaagacagcgtttctccatggggaattgaaagagaagatctacatgatgccgcctgaaggatgtgaatccttattcaaagagaatgaggtatgtcttctgaacaagtctttgtacggtcttaagcaagcacctagacagtggaatgaaaagtttaatcattacatgactgaaattggtttcaagagaagtgattatgatagttgtgcttatactaagaaactgtctgatgattccacgatgtatttattgttctatgtggatgatatgcttgtggcggcaaacaacatgcaagccatagacgcattgaagaaagagctgagtattaagtttgaaatgaaggatctaggcgcagctaagaagatccttggtatagaaatcatcatagatcgagaagcaggtgttctgtggctgtctcaagagagctacttgaacaaagtactcaagacattcaacatgctggaatcaaaaccagcattgactccactgggagctcacttgaagatgaaatctgcaactgaagagaagctaagcacagaagaagagtatatgaactcagtcccatactcgagcgctgtaggaagcatcatgtatgccatgataggcacccgtcctgacttggcctatcctgtaggcgttgttagcagattcatgagccagcctgcaaaagaacactggttaggggtgaagtgggttctgaggtacattaaaggaactgtggacacaaggttgtgttacaagagaaattcagacttcagtatctgtggttattgtgatgcagactacgcagctgatctagacaagagaagatctatcacgggtctggtgtttactttgggtggcaacactataagttggaagtctggactgcagagagtagttgcacagtcatctacagagtgtgaatacatgtcccttacagaagcagtgaaagaagctatctggttgaaaggtcttctaaaagattttggttatgagcagaagaatgtggagatcttctgtgattcacagagtgctattgcactctccaagaacaatgtgcatcatgaaagaaccaagcacattgatgtcaagtttcactttatccgggaaatcatagctgatggaaaagtggaagtgtcaaagatatctactgagaagaatccagctgatatcttcacgaaagttctacctgtaaacaagttccaaactgcattggactttttacgggtaaagtctgagtag

SEQ ID NO: 2804 - DNA, 2241 bp, Arabidopsis thaliana
  Clone ID: AT_K16E1.C1.o1.tg
atgggagttccgtcgttctacagatggcttatccagaggtatccattgactatacaagaagttattgaagaagagccactcgaagttaatggcggcggcgtcacgattccaatcgattcaagcaaacctaatcctaatggttacgagtatgacaatctttatctcgacatgaacggaatcattcatccatgtttccatcctgaagacaaaccttctccaactacatttacggaagtgtttcaatgtatgttcgattacattgataggctttttgttatggttcgacctcggaagctcttattcatggctattgatggtgttgctccaagagctaaaatgaatcaacagagagctagaaggtttagagctgctaaagatgcagctgaagcagcagctgaagaagagcagctgcgggaagagtttgagagagaagggaagaagttgcctcctaaagtggattctcaagtttttgactctaatgttattactcctggaacagagttcatggctactctgtcctttgcgttgcgatactacattcacgttagactaaattctgatcctgggtggaaaaatattaaggttatactctcggatgctaatgttcctggcgagggggaacacaagatcatgtcatacatacgttgtaataagaaccatcctggttataacccaaacactcatcattgtctatatggtttggacgccgatttgatcatgctgtctttggccacccacgaaattcatttttcaatccttcgtgaggttttctttcctggagaggaaggcaaatgcttcttgtgtggtcaagaggggcaccgagcagcagattgtgagggaaagataaagaggaagacaggagaaatgcttgataatactgaggcagatgttgtggtgaagaagccatatgagtttgtcaatatatggatactacgagagtatttggaacacgacatgcagattcctggagcaaaaaaaaatttggaccgcttaattgatgacttcatcttcatctgttttttcgttgggaatgatttcctgccacatatgcctacgctcgagatacgggagggtgctatagaactgctgatgtctgtgtacaagaataagtttagatcagcaaaaaaatacttaaccgattcaagcaagctgaacttaagaaatgttgagcgtttcatcaaggccgttgggatgtatgaaaatcaaatatttcagaagagaaggcaatcagaaaggtttcgtcgtgacaaagctcgtgacaaagctcgtgacaatgctcgtgacaatgctcaagcaagcagacaattctctggcaagttggtgcaattagattctctagatgaagtgtctgattcattgcattcatcaccttcacgaaaatatttgcgtctgtctttggatgataacattggtgtggcgaatgttgaaacagaaaatagcctcaaagcagaatgcactaaagtacacagcggttttcaggaactagataacgaagaagacttaaagtttaagcttaagaaactactgcgggataaaggtgatgggttcaggtcaggaaatggagaacaagataaggttaagctaaataaagtaggatggagagagagatattacgaagagaaattcgcagctaagtctgtggaggaaatggaacaaatacgcagagatgttgttttgaagtacacagaaggtctttgttggataatgcattattattatcatggtgtttgttcctggaactggttttatccatatcattacgcacctttcgcatcagatctcaagggccttgagaaactagatattaagtttgaactaggttccccgtttaaaccatttaatcagcttctggctgttcttccatctgcaagtgcacatgctctcccagagtgctataggtcattgatgacaaatccagattcgcctatagctgacttttatcctgctgattttgagattgacatgaatggaaaacgctactcttggcagggtatatcgaaactgccttttgttgaagaaaagcgtcttctggaggcagctgcgcaagtggagaaatcactgacgaacgaagaaattcgaagaaacagtgcgttgtttgacatgctctttgtggttgcttctcatccccttggtgaactcatccgttctcttaatagccgtaccaacaacttgagcaatgaagaacgtgcaactatcattgaaaaaattgaccctggactaaggtttgtgtctgaatcttga

SEQ ID NO: 2805 - DNA, 1575 bp, Arabidopsis thaliana
  Clone ID: AT_F17L24.C1.o5.tg
atggtcaccgaagaagttgtagttcacaagcaaagccgacaaccattacttgaatcaagcggtgaacaaaagcaatgtaagtcttctaatctttcaaaatccaggggagtcacttgttataactgtcgtaagaaaggacatttagttgcaacttgccctgaaaaacttgagctaactaatacttcattagaatcgaaactgagctcaccaaactcaagtagtgaagtagttagtcaaggtttaaaaaattctagttcttgtgtcatgcacttgttcttgtcaaaggatgttgattctggtcatactatggagcatgagaatgacaaaactgaaggaagcacaaaagaggagactcatcatttggtgtcaaccacttcacaagcttgtcgagctgactatgtttcaaaaatcaccatcttgaacaagaaaggaccgccatatgtatcccaaccagttctaaaccgagagttacctaaagaagaaccacatgaattaggaggattcactcaagttgaggctgtcatggtccacaaacaatcacctagagctgaatgcaatattttttcaaggataaaccaccagatgctacaccaccatttaaaactcgagtggcgacaaggagagttgttagatagctctagagaggaggagttggtcaccaacaatgccttgatccaaaaagaactcccggatccaacgccacttccattagtcatgatgataccaagcaccgaacacattgtgaaccttactcaggtaagaaacattgagaaagagttagatttatctaaagaatatttggaatcaaactcttgtcttaggataaaagtaaaacatgaacatttcaagaatgatgcattgattaaagctgagccatgtttacttgtttatagtgatttcatgactatgataacgcacttgctttttgccaaaggtgttgacaacattgtaggtgtaaacgaggagccaccaaacttagaatttctctcctccaatctctttaaaaggactggaattggagttgttttgatgccaaagatcgattatccatccaaccgaacaagaagaaaaagcaaaaatgcttatgaacttgagctacaaggtgaactggatttgaggtcaaatccttttcaagtgggagaggatgatgtgatcatggaaatcacaaaggacttggaatttgatcaagagctcgtagccgaggaagagcttaaagcagaggagcagcttgaacctgaggagcattttgaaacagaaaatgtacttatagcgatgaaagagtatgtgaaagatgttatcttaacctcattggttttgatacatgatcatcaaatgggcatgtgtctcatttgtactctgtttcccttgtcaagttttgtcccaatgggttttcttgacaaggtttttaatgaggcaaatgattcacattcaaatcacccatttgatgatccaaaccatggtataacattcagaagttggcccaatagaatatatatgaagtccaacaaattttatgaccatcacaaaaaaaaaataaaaaaaaattcacatgatatgatcctgatgaggaattaa

SEQ ID NO: 2806 - DNA, 3036 bp, Arabidopsis thaliana
  Clone ID: AT_T19B17.C1.o2.tg
atggaaagcacaaaggacatggaatttgatcaagagcttgtagccgcggaagagcttgaagcagaggagcagcttgaacctgaggagcattttgaaacagaaaatgaacttataacggagaaagaatcatggatccattttcgtatgtcgaattttgatctttctcgacttatcaaaaggattttccgcatccttttgtggcgtcattcaatccatcatctcgtctttgagtcgtgtgtcgtctctatttcgagaatatccactccagatcttccaagtgccgaaattgggattgattcctcaccaggatcatatcatgttgtatcagagcacacttggagtgtccgatcaagtcaaactgtcgtgattagggttctaggagagttttgtgtcgcaatgtcaacaactgaggagagatcaagccacaaccgcaacaagcatctaattgaagctcttaccactgaaatggggcaaattttcgacatccacttaaatcaaattcatcaagggcatcacaaagcacgaaaaaagaaggaacaagagcttaagtctaagccaccggataactcattgagatcaatacaaagcagcccacagaaaatcacccacactcccaaatccaaatctgtgtttcattttgattataaaccgactaatgcacttttgaaattttcaggaaaacaagattacctagagtgggagaaaaacatggacgagtggttttcctacaaaaacttcttgagcgaaatgagatttgtttgtgcacttagccacctcacgggagacgcttacaaatggtggttgcaagaagttgatgatcgcttatattataaggagccacctatcacattgtggagagattttaagaaactgctaagaaataagtatgctccacaagcactagaatgcactccaaaaggcaatcccaaaatccaagggttagcagctcaagaaaaggaacaaggcttagccccatattcgaagaaaaaccccatagcagaacaacagttgaaggatgaaattctgaagattctcaatgcttacaacaaacccaagaaagttaagtcaacatctcaaccaaagatggtcaccgaagaagttgtagttcacaagcaaaaccgacaaccatcacttgcatcaagcggtgaacaaaagcaatgtaagtcttctaatctttcaaaatccaggggagtcacttgttataactgtcgtaagaaaggacatttagttgcaacttgccctgaaaaatttgagctaactaatacttcattagaatcgaaactgagctcaccaaactcaagtagtgaagtagttagtcaaggattagaaaattctagttcttgtgtcacgcacttgttcttgtcaaaggatgttgattcaggtcatactatggagcatgagaatgacaaaactgaaggaagcacaaaagaggagaatcatcatttggtgtcaaccacttcacaagcttgtcgagctgactatgtttcaaaaatcaccatcttgaacatgaaaggaccgccatatgtatcccaaccaattctaaaccgagagttacgtaaacaagaaccacgtgaattaggaggattcactcaagttgaggctgtcatggtccacaaacaatcacctagagctgaatgcaatatttttttcaaggataaaccaccagatgctacaccaccatttaaaactcgaggtatttatctaaactcccaaaatcgaatgaaagctaatttgcgttctcttggtgaaggttgtacactttggggggcaatcaagaagactaatgatcgggagataagcactcatcatatgagtcaatcaagagatcctcgtgaagattatcaaaatcaacttcggctaaaaaacatggaagaatgcatagaggagcctgaaatggatatttcttcatttagtactttccatacctatcagtggcgaccaggagagttgttagatagctctagggaggaggaattggtcaccaacaatgccttgatccaaaaagaacccccggatccaacgccacttccattagtcatgatgataccaagcaccgaacacactgtgaaccttactcaggtaagtaactctttaactcgatttgtttctcatgtttctataattgttactatgagtttatcatatttaggaaacattgagaaagagttggatttatttaaagaatatttggaatcaaactcttgtcttaggataaaagtaaaacatgaacatttcaagaatggtgcattgattaaagttgagccatgtttacttgtttataatgatttcatgactatgataatgcacttgctttttgccaaaggtgttgacaacattgcaggtataaaagaggagccaccagacttagaatttctcatgtccaatctctttaagaggactggaattggagttgttttgaagccaaaggtcgattatccatccaaccgaacaagaagaaaaaacgacaatgcttatgaacttgagttgcaaggtgaattggatttgaggtcaaatccttttcaagtgggagaggatgatgtgatcatggaaagcacaaaggacatggaatttgatcaagagcttgtagccgcggaagagcttgaagcagaggagcagcttgaacctgaggagcattttaaaacagaaaatgaacttataacggagaaagagtatgggaaagatgttatcttaacctcattgattttgatacatgatcatcaaatgggcatgtgtctcatttgtagtctttttcccttgtcaagttttgtcccaatgggttttcttgacaaggtttttaatgaggcaaatgattcacattcaaatcacccatttgatgatccaaaccatggtataacattcagaagttggcccaatggaatatatatgaagtccaaccaattttatgaccatcacaagcccaagaaaagcccaaaccaagtgggtaatttgctggtcaagagaagtgacgaaaatagcatatcaagagtcattttggagccaagaagtggaagggttatttttaaactttcaaactag

SEQ ID NO: 2807 - DNA, 2958 bp, Arabidopsis thaliana
  Clone ID: AT_F10A5.C1.o11.tg
atgggtgtaccgtcgttttaccgatggttggccgagaagtatcctcttttagtggcggatgttatcgaggaagagcctgttgaaatcgaaggcatcaagattcctgtggatactagtaaacctaaccctaacaacctcgaatacgataatctttatctcgacatgaacgggattatccatccttgctttcaccccgaagataggccatctccaactacctttgaggaggtgtttcagtgtatgtttgattacattgataggcttttcgtgatggtacggccaaggaagttactctatatggctattgatggtgttgctccaagagctaaaatgaatcaacagaggtctagacggtttagatctgctaaagatgcatcggatgcagctgctgaagaagaaaggctacgagaggagtttgagagggagggtagaagactccctcctaaagtggactctcaagtgtttgattctaatgttattacacctggaacggaattcatgggtgttctgtctattgcgctgcaatattatgtacaccttagacttaatcatgatgttggttggaaaaatatcaaggtcatcctttcagacgcaaatgttccaggtgaaggagagcataaaatcatgtcatacattcgtcttcaaagaaatcttcctggttttgacccaaacacacggcattgcttgtatggactggatgctgacctgattatgttgggcttggcgacccatgaagttcatttttcaattcttcgagaggtggtctacactcctggacagcaggagaggtgcttcttgtgtggtcaaatgggccattttgcttcaaattgtgaaggaaaaccaaagaagagggcaggagaatctgatgagaaaggcgatggaaatgattttgtcaaaaagccatatcagtttctacatatctgggttcttagagaatacctggagcttgagatgaggattcccaacccaccatttgagattgatctagagcgcattgttgatgattttatcttcatatgtttctttgtgggcaatgacttcttaccacatatgcccacattagagattcgagagggtgctatcaacttgcttatggctgtttacaagaaggaatttcggtcttttgacggctacttaactgatgggtgcaagccaaatttaaagagggtggaacagtttattcaggctgttggatcgtttgaagataagatatttcagaaaagagccatgcaacatcagaggcaagcggaaagagtaaagcgagataaagcaggtaaagcgacaaaaagaatggatgatgaagctccgacagttcaacccgatcttgttccggttgcacgatttagtggttctcgacttgcttcggctcctacaccttcaccatttcagtccaatgatggaaggtctgctccacatcaaaaagttcgacgtttatctccaggatccagtgttggtgctgctattgttgatgttgagaacagtctcgagtctgatgaacgcgagaacaaagaagagctaaagacaaagctcaaggagttaatccgtgagaaatcagatgcgttcaactcagatactactgaagaggataaggtgaagctagggcaacctggatggagagaacgttattatgaagagaagttctcagtagtaacccctgaagaaatggaaagagtccggaaggatgttgttttgaagtacacagaaggcctttgttgggtcatgcattactacatggaaggtgtttgctcctggcagtggttctatccttaccactatgcaccattcgcttctgatctgaaggatttgggagagatggatattaagttcgaattaggaactccttttaagcctttcaatcaacttcttggggtgttcccagctgcaagttcgcatgcacttccagagcgctacaggaccttgatgacagatcccaactctcctatcattgatttttacccaactgattttgaagtcgacatgaatgggaagcgtttttcctggcagggtattgctaagctgcctttcattgatgaaaggcgcctactagaagctgtttctgaagtggaatttacattgacggatgaagagaagcgtagaaacagcaggatgtgtgatatgcttttcatagcaacgtctcatcgtctagctgaactcgtcttttcacttgacaatcactgtcggcagttaagtgccagggagagagtagactttaaggttaagatcaaacctaagctcagatgttgtatttacagacttccagatgcacatgaacacataaccaggcctcctcccggtgtcatcttccctaagaagactgtggacataggggacttgaaacccccacctgctctgtggcatgaagacaatggaaggagaccgatgcataataatcacgggatgcataataatcatgggatgcataataatcaggggaggcaaaacccacctggaagtgtatctggaaggcatctgggaaacgcagcacatcgtcttgtttccaacagcttacagatgggaacagaccgatatcagacaccaacagatgtcccggctcctggttatggctacaatcctccgcagtatgttccaccaattccttaccaacatggtggctatatggctccacctggtgcacaaggctatgctcagccagctccttaccaaaaccgaggtgggtaccaacctcgtggacctagtgggagattcccatcagagccttaccagagtcaatcacgggaaggtcaacatgcctctagaggaggggggtattctggtaatcatcagaatcaacatcaacaacaacaatggcatggtcaaggtgggtccgagcaaaataacccacgagggtataatggtcagcatcatcatcaacaaggtggtgaccatgaccgcagaggaagaggaagaggaagtcatcatcatcatgatcaaggcgggaatcctagacatcgatattga

SEQ ID NO: 2808 - DNA, 1530 bp, Arabidopsis thaliana
  Clone ID: AT_F22G10.C1.o24.tg
atgtcagttcttattgtgacgagccttggtgatatagtaattgaccttcactcggataaatgccctttgacttgcaagaacttccttaagctttgcaagatcaagtactacaatgggtgtctttttcacactgtgcaaaaggatttcacagcacagactggtgatccaactggtacgggagctggtggagattcaatctacaaatttctgtacggtgagcaggctcgtttttacaaagatgagattcatcttgatttaaaacattcaaagaccggcactgttgcaatggccagtggtggagagaatctcaatgcttcccagttctatttcacacttcgtgatgatttggactatcttgatgggaaacacactgtgtttggacagattgctgaggggtttgacactttgactaggataaatgaagcttatgttgatccgaagaacagaccctataagaacattagaatcaagcacacacatatacttgatgatccatttgatgatcccccacagctggctgaaatgatgccagatgcttcccctgaaggaaaaccgaaagaagaggtcaaagatgacgtgcggcttgaagatgattgggttccaatggatgaagaacttggtgctcaggaactggaggaggttatccgcgaaaaggcagcccattcaagtgctgttgtacttgaaagtataggagatatccccgaggctgaggtaaaacctcctgacaatgtgctgttcgtctgcaaactgaatccagtgactgaggatgaagacctccataccattttttcacgctttggaaccgttgtatcggctgatgtaatccgggatttcaagacagttgtggtgttaactgagagttttgtctctgttctagagtttgagaacaaggagtcatgcgaacaagcgtactttaagatggacaatgctctgatcgatgatagacggatacatgtggatttcagtcagagtgtgtccaaactttggtcacagttcaggcaaaaagactcccaaaagggcaaagggaatgggtgtttcaaatgcggctcgacggatcatattgccaaggactgtgtgggtggtccgtcttcaaagtttattgtaaaagatcaaaacagacagcacggaggaggtgaaggctatgagatggtgtttgagggtgatgtgcatgaaacccccaagcataatagtcatgagagggagaggagtgagaagattcagaggagaagtcctcatggtaatggggaaggcaaaagacagcacagagatgaacgtgatgatggtagaagacagcatgatcgggaagacgcacgagaactggagaggaaacacagagagagaaaagaaagagagagtagggaagatgaagacagaagaagaagaagacgccgtgaagagtctagagataaagagagtcggagagagagagacgaagatgatcatcggagtcatagagattataaagagaggagaagagagagagacgatagacatggaagagaagctagacatgagagaagggatagatga

SEQ ID NO: 2809 - DNA, 2415 bp, Arabidopsis thaliana
  Clone ID: AT_MWD22.C1.o25.tg
atggagtccgtcgaaatgaacaatcccaattcgcaaaccctagatcaacctcctccttcctccaacggagacactgctccactcgcattggatcatatgaatcctcagaattcggagtctgtggctttaaacggttcttctactcctatccccgatactaatggttcatcagcaaagcctgagctcttacgtcctttgctatcggagaacggtgttagcaagacgctgagtggtaacgataaggatcagtctggtggagaggaagagactacaagccggaggaagcgtcggagtcggtgggatcctccgccttctgagtccattaataaccctagcgccgaagggggtactgattccggtactgggactaggaagcgtaagtcgagatgggcagatgatgagccgaggacgcaaattcagttacctgacttcatgaaggatttcactggaggtattgagtttgatcctgagattcaagctttgaatagtaggttacttgagattagtaggatgttgcagtctggtatgcctttggatgatagaccagaaggacagaggtctccttcaccagagcctgtgtatgataacatgggaattaggatcaacactagggagtatcgagcgagggagaggttgaatagagaaagacaagaaattattgctcagattatcaagaagaatcctgcttttaaacctccggcagattatagacctcctaagctccataagaagcttttcattccaatgaaggagtttcctggttacaattttattggtctgattattggtcccaggggtaatactcagaagagaatggagagggagactggtgcaaaaattgtaattcggggtaaagggtctgtaaaagaaggtaggcatcagcagaaaaaggatttgaaatatgacccttctgagaatgaagacttgcatgttttagtcgaggctgagactcaggaagctcttgaagctgctgctggtatggttgaaaagctattgcaacctgttgatgaagtgctcaacgagcacaagaggcaacagctcagggaacttgcaaccttgaatgggacaataagggatgaagaattctgtagactgtgtggtgagccaggacatagacagtatgcatgtccttctcgtacgaatacctttaagagtgatgttctttgcaagatctgtggtgatggtggacaccctactattgattgcccggtgaagggtactactgggaagaaaatggatgatgaatatcagaacttcttggcagagttaggaggaactgtacctgaatcttctctcaaacagagtgctaccttagctcttggtccgggaagttcgggaagtaatcctccatgggctaataatgcagggaatggtgcaagtgcgcatcctggcttagggtcaactccgactaaacccccctccaaagaatatgacgaaacaaatttgtacattgggttcttacctccgatgctggaggacgatggtttgattaatctcttttcatcctttggtgaaattgtgatggcaaaggtaatcaaggaccgtgtgactgggctgagcaaaggctatggttttgtgaagtacgctgatgtacagatggctaatactgctgttcaggcaatgaatggctatcgtttcgaaggccgaacactcgctgtcaggattgcaggcaaatcgccaccgcctattgcacctccaggacctccagctcctcaaccaccaactcaaggttatcctccctcaaaccagccgcctggtgcctatccatctcaacagtatgccactggtggttattcaacagctccagttccttggggtcctcctgttccttcctattctccatatgctcttccccctcctcctcctggttcttaccatcctgtccatggtcaacatatgcctccttatggaatgcaatacccaccaccaccacctcatgtgacacaagcacctccacctggcactactcaaaacccatcttctagtgaaccccagcaaagcttcccaccaggagtacaagctgatagtggtgctgctacgtcgtctataccaccaaatgtctatggtagctcagtcacggctatgcctggacagcctccatatatgagttatccgtcttactacaatgctgttccccctccaacacctcctgcaccggcctcgtctactgatcattcccaaaacatgggtaacatgccatgggccaacaatccttctgtctcaacacctgatcactcacaaggtcttgttaatgcaccttgggcacctaatcctcctatgccacccactgttggctattcacagagcatggggaacgtaccctgggctcccaaacctccagtacagcctcctgcagagaatccatcctctgttggagagtctgagtatgagaagttcatggctgagatgaagtag

SEQ ID NO: 2810 - DNA, 1236 bp, Arabidopsis thaliana
  Clone ID: AT_MSA6.C1.o7.tg
atggcggcgagtctaccagacggtgtttccgatgactttgactacgaagattggtctccaatggtgaaaactagactcgtggaaaatggagtttgggatgttgttcaaaacggagtctcgccaaatccaacgacgaatccagagttagcggcaactatcaaagccgtagatctagcacaatggagaaatcttgtggttaaagacaacaaagcgctcaagataatgcaatcttctctcccagattcggttttcaggaaaacaatctcgattgcttcagccaaggaactttgggatttgctcaaaaaaggtaacgataccaaagaagctaagctacgtagattagagaaacaattcgaaaaccttatgatgtacgaaggagaacgaatgaaattgtacttgaagagacttgagaaaatcattgaagagttatttgttttgggaaatccaatatcggatgataaggttatcgcgaagctgttgacttctctgccacggtcgtatgatgattctgttcctgtgttgaaggaattcatgactttgcctgaactgactcatcgcgatcttcttaaggcttttgaaatgtttggatcagatcctaaaactatgcctcaggagttgatgaagttcataatgatccttagaagagcctggtctgagcggatgtggtgtagtgcgtgcgagacgtacaatcataaccaagaagactgttattacaaccctagggtagtgtacttgggtggaggcagaggccaatgctttcaatgtggagaaagagggcattttgctagagattgctgcaatactaggaatctgcaaccaatagatcggaagagagaagtcaaagatgattttacatatgatgaggatatgtggatgctatacaccacctctgagaatcacatgagtccgtatgagaagtttttcacatctttggacagaacatacaaagctggtgttcaattacccaacgggaatgttgtcatggtagaagggataggagatgtcaagttcatgatggagggagtgaggatgactatcaaggatgtgcttttcgttccttggatcaacaaaaacatattgagttttagtcggatgaaaaagagaggctattcaatggaagtggatgacggtgaatggatcattcgggacaggactgggaaagtatttgttaaaaccttgcgggaagagagaggcattgctctgcgtttgcagatgattgaaaggtattcactttga

SEQ ID NO: 2811 - DNA, 1317 bp, Arabidopsis thaliana
  Clone ID: AT_MSA6.C1.o5.tg
atggcggcggcgaatatacacgacgccgttgtttccgatgacctgaactatgaaatctgggctccaatcgcgaaaactacactaacggagaaaggactttgggatgttgtcgagaacggagtcccaccggatccatcgaaggttccagagttagcagcgacgattcaagccgaagagttttcgaaatggagagatctcgcggagaaagacatgaaagcgctccaaattttgcaatcttctctcacggattctgctttcaggaagactctctccgcttcttcggccaaggacctttgggattctctcgaaaaaggtaacaatgaacaagcgaaactacgtaggttagagaagcaattcgaagaacttagtatgaatgaaggagaaccgatcaatccctacatagatagggttatcgaaatcgttgaacagttgcgccgtttcaaaattgcaaaatccgattatcaagttatcgaaaaggtgttagccacgctctcaggatcatatgatgatgtagctccagtgttgggggatctcgtggatctgaagaatatgagtcttaagagttttgtcgagttgttttatgtgtatgattcgataacagaagaatctatccatctaatgttgaaggctaataggcttagatcgatggctgaggaggagtcttgtgtgttgtgcaacaagaacaatcacaaacaagaagattgttcttcttcaatccctaaggcagggaagtcaagtggagccaggcaatctaagccgaaaaaaggcaaatgctttcaatgtggagaacgaggacataaagccaaagattgcaacaaaaagattcagcaaccagcggtgacagaagatcagattgagatagttgaggaaaaagaaatcgaagttgattttctactgttagcagcgttgaatttgaatgaattcacatatgatgagaatatgtggatgatatacggccatgccacgaatcacatgactccatatgagaagcttttcaccactctagacagaacatacaaagctaaggttggtttggttgacggaacaattatcatggtagaaggaataggagatgtgaagatcaagatgaaggaagggaaacagaagacgatcaacaatgtgatttttgttcctgggctcaatagaaacgtgttgagtgttcagcagatgaaatcaagaggctgttcattcataaatggagcacgaggcgaatgcattgttcatgatcggactgggaaagaatttggggatactttgtgggataagagaggattatctctgcgtttgcaggtgattgaaggtaatgccacctcttaa

SEQ ID NO: 2812 - DNA, 3417 bp, Arabidopsis thaliana
  Clone ID: AT_F5K24.C1.o1.tg
atggaagctataacagctactcttaccgcaactctcactactaatatggctaagatgatggatgagagatttgaggctgcaaggtctaaccaagaaaggaagaacagaactatgaggaataattctgatcgggaggcaacacttagctactacagccaatcctctactcgcactagtcataggaggcaaagacgtgggcaagaagaaagacaccctccaagagacaacttagctaatcttaagcttcgcatccctccattccatgagtatactgaagcaaacaaggttaaagtggcagccactgaattctatgattatgcactaagctggtgggatcaagttgttactactaaaaggcgtcttggagatgattcgattgaaacttggaatcagctaaagaatatcatgaagagaaggtttgtgcctagtcattaccatagagagctgcaccaaaggttgaggaatttggttcaaggaaatagaacggttgaggagtacttcaaagaaatggaaacattgatgctaagggctgatgttcaagaagagtgtgaagcaactatgtctagattcatgggaggcctcaatagagacattttagaccgtttcgaggtgatacattatgagaaccttgaagaattgtttcacaaggcagtcatgtttgagaaacagattaagagaaggagtgctaagcctagctacaattctagcaaacctagctaccaaagagaagagaaatctggttttcaaaaagagtacaagccgtttgtgaagcctaaggttgaagaaatcagttcaaaggggaaagaaaaagaagttacgagaactagagatctcaagtgtttcaaatgccacggacttgggcattatgctagtgagtgttccaacaaaagaattatgataattagggacagtggagaggttgagtccgaggatgagaaaccagaagaatccgatgttgaagaagcacctaaaggagagctacttgtgactatgagggtcttaagtgtgctaaacaaagctgaagaacaagcgcaaagagagaatctgttccatacaaggtgtttgattaagggaaaagtgtgtagtttgattatagatggtggaagctgtaccaatgttgcaagtgagactatggtccagaaacttggtttagaggagtttccgcatcctaaaccttataaactgcaatggctaaatgagagtggagaaatggctgttaccagacaagttcaagtgccgttagccattgggaagtatgaggatgagatcttatgtgatattctgcccttagaagccagtcacgttttgttaggaagaccttggcaatctgatcggaaagactatcaagatgtttttcccgaggaaaatccagaaggtttaccacccattagaggcattgagcaccaaattgacttcgttccaggagcttctttgccaaacagaccagcttataggaccaatcccgtggagaccaaggaactagaaaagcaagtgaatgagctaatggagagaggtcatatttgtgaaagtatgagtccatgtgctgttccagtgttgcttgtacctaagaaggatgggagttggcgttttgttgcgagtacagatggagttaaggttgatgaagagaaagtgaaagcaattcgggaatggccaagtccaaaatctgtaggaaaagtaaggagttttcatggacttgccggcttctataggaggttcgtgagagattttagcactctagcagccccactcaccgaagttatcaagaaaaacgtgggattcaagtgggaacaagctccagaagatgcattccaagccttaaaagagaagcttactcatgcccctgttttatctcttcctgattttcttaaaacttttgaaatcgaatgtgatgcccccggggtaggaattggtgctgtcttaatgcaggataagaagccaatagcttatttcagtgaaaagctaggaggagctactctcaactatcctacatatgacaaagagctttatgctttggtgagagccttacaaacgtggcaacactatctttggcctaaagagtttgtcattcacaccgaccatgagtccctaaagcatctcaaaggacagcaaaagcttaacaaaagacatgctaggtgggtcgaattcattgagacgtttccctatgttatcaaatacaagaaaggtaaggacaatgtagttgccgatgcattgtcaaggagacatgaaggattcttgttttatgataaccgtttgtgtattcctaattcttctttgagagagttgtttataagggaagcacatggtggaggcttaatgggacactttggagtctcaaaaactcttaaggttatgcaagatcactttcattggccgcatatgaagagagatgtggagagaatgtgtgaaaggtgcacaacatgtaaacaagctaaggctaagtcacaaccccacggtttgtgtactcctcttcctattcctttgcatccttggaatgatatttctatggactttgtagtaggtttgccaaggactaggacaggtaaagattccatttttgtggttgtggatagattttctaaaatggcacacttcattccatgtcataaaactgatgatgccatgcatatagccaatctgttctttagggaagttgttcgcttacatggaatgcctaaaaccatagtatcagatagagacactaagttccttagttacttttggaaaacgctttggtctaagttaggaactaagttgttattctctactacttgtcacccgcaaactgatggacaaactgaggtagttaataggactttgtctacactcctgcgtgcattgataaaaaagaatttaaagacttgggaggattgtttacctcatgttgagtttgcatataatcattctgtgcattctgctactaaattttcaccttttcaaattgtttatgggtttaatcccattactcctttggatttgatgcctttacctttgatttcgattcatctccgaaaagaacgttttcctaacaagagaaagtctaaacttatgccgcggatggatggatcttttaaagttctcaagaggatcaacgacaatgcctactctctggatttgcaagatgaaacagatttgaggtcaaatccttttcaagtgggagaggatgatgtgataatgggaagcttggatcatggagctaaggagcagcttgaacccgaggagtttggagaaagaaagcagcttgaggatggagagcttggagctaaaaaggatgaagcattgcatgttcttgaaggtccaataacaagatcaaagacaaagctactaaatcaagctatcaccacacttctacaaaagattgagggcagccttaaacaagaagcttgtccaaccacgttggtagtgattcaagccgtttaa

SEQ ID NO: 2813 - DNA, 3315 bp, Arabidopsis thaliana
  Clone ID: AT_T27D20.C1.o5.tg
atgaaggtcgagattaaaaccttcaatggcgatcgagacttctcgttttggaagataagaatagaagctcagctcggcgtactaggcttgaagaacagccttacggattttaaattgaccaagacagttcctgtggcaaagaaagaggaaaaagaatcagaatatgaagatgatgcatctgatataaagcaagctactgaagaaccagatccgattaagtttgagcagtctgaacaagcaaagaacttcatcattaatcacatcactgatacagttcttttaaaggttcaacactgtaagaccgctgcagagatctgggcaacattgaacaaattgttcatggaaacttctttgcttaatcgaatatacacacaattgaagttgtattcattcaagatggttgatactttgagcattgatcagaatgttgatgagtttttgaggattctggctgactgtcttgatcaaaatttactgccatctagttacatccaacttaaacatactcttaatacagatgtggtatcatccgccaagtcacttgagagaaagttatcagagactcaagaaagcaacaaaaatgtgtccatggctctctacacaacagatagaggcagacctcaagtgaggaatcaggataagcaaggtcaaggaaagaatagaggtaggtctaactctaaaacgcgagtgacttgttggttttgtaaaaaggaagctcatgttaagagagattgttttgcgagaaagaagaagctggaaaatgagaatagagcaacaatgatacttttgggtgatgatcacacagtagaatcaagaggatgtggtaccatcaaattgaacactcatggaggtttaatcagaatgctgaaaaatgtcagatatgttcctaacctaagaagaaacttgatctctactgggacacttcactctcttggttacaaacatgaaggtggagaaggaaaactgagattctacaagaatggcaaaactgctttatgtggatacttgatgaacggtctctatattctggatggacacacagtagctactgaaacctgcaatgcagaaagtgctaagaacagcacaaagctactgattgagaaaaaggaattcaaggacttggacttctgtgaacactatgttatgggaaaatcgaagaaactcagttttaatgttggtaaacatgttacagaagacatacttggatatgttcatgctgacttgtggggatcaccaaatgttactccatctatctcgggtaaacaatacttcttatccattatagatgacaaatctagaaaagtttggttaatgtttctgaaatcgaaagatgagacatttgataagttctgtgaatggaaggaaatagtagagaatcatgtgggaaagaaggtcaaaactctaagaactgacaatggattggagttttgtaataacagatttaatgactattgtgccaagactggcattgaaagacaccggacgtgtacctatactcctcagcagaatggagtgactaaaaggatgaatagaacaataatggaaaaggtgaggtcacctgcttcagcagttgatcacaatgtgccagagcagttgtggctcaacagagaacctggatataagcacctgagaagattcagttctatagcctatgttcatcaagaacaaggcaagttaaaaccgagagtattgaaaggagtgtttctcggatatcctcaaggcactaaaggttacaaggtgtggttaattgatgaagaaaaatgtgttatcagcagaaatgtggtgtttaatgaagattcagtgttcaaggacttacagtcaggaagcaaagatgaagatgaaacagtaacacaggaatctcagattgagattgaaacgccgccaaaatcagaacttgaaacacagaatcaggttcaaggtggagctactcaagtccagctcaatgattctgaagatgaatataatgatgttgaaggatttgcttttgctctagtcatggcagaagaagttgaatcagaggaaccagtatgttttcatgatgttaaggaagacaaagactgggaaaaatggcatggaggcatgatagaagaaatggattctctgttgaaaaatgcaacctgggatatagtcgacaaacctaagaatcaaaaagtgataagctgtcattggttgtacaagaagaagcttggaattcctggtgttgagctaccaagatataaggcaaggttggtagcaagaggattctctcatagagaaggaattgactaccaagaagtgttctcacctgttgtgaaacacacatcaatcagaatcttactatccctaatggttaaagaggacatggaattagaacagatggatgtaaaaacagcatttttgcatggagaacttgatcaaacattgttcatggaacaacctgaaggctttgaggcacctagacagtggaataagcggttcaatgcattcatgatggatcagaagttcagtagaagtgtgagtgattcatgcgtctatgttaaagaggtaagcaatgctaagagtatgacagagattaaaaagcttaagaaagttttgagtagagaatttgaaatgaaggatatgggagctgcaagtaggaaattgggaatagatatcataaggaataggagtgaaggaactctatgcttgtcccagactagttacttggaaagagtaattcagaagttcagaatggatggggctaaggttgtgaatactccaattggtgctcatttcaaattgtcatcagttcataacgatgatgaaagagtaggttctgagaaagttccctactctagtgttgtcggcagtctcatgtttatgagcaagcaaggagaagtacattggacagcagtcaagtggttgttgaggtatcttaaatggtcaataggattaaacttgatgtatactaaaggatttgattttaaagtgcagggttattgcgattcagatcatgctgcagaccttgataagaacatgtctattagcggatatgttttcacagtgggaggcaacattgtgagctggaagtcatgtctgcaaccagttgttgcgctgtcaaccactgaagcagaatacatagctcttactaaggctgtaaaggaggctatgtggataagaaacttgttggatgatatgatgcttggaactgagactgctgaagtagacattattgaagctggtgaagtcgaagttcataagattcacacgactaggaatccagctgatatgctcacaaaaggtataccagtttcgaagtttgaagcagcattggagttcctgaagctgctcaggtaa

SEQ ID NO: 2814 - DNA, 4020 bp, Arabidopsis thaliana
  Clone ID: AT_T2O9.C1.o150.tg
atgtcgtcatctgagaaatttgtgcagccagctatcccgagatttgatggctattacgatttctggtcaatgacaatggagaattttctccgtagcagagaactgtggagattggtggaggaaggaattccggcaattgtcgttggaacaacaccggtcagtgaagcgcaaagaagcgcagtggaagaggctaagctaaaagacttgaaggtcaagaattttttgtttcaggctatcgatagagagattctggaaacaattcttgacaagagcacctctaaggcgatctgggaatcgatgaagaaaaagtatcaaggttctacgaaggtgaagagggcacagctacaagcattaagaaaggagtttgaattgctggccatgaaagaaggagagaagatcgatacttttctgggaagaactttgacggtggtgaacaagatgaaaaccaatggtgaggtgatggaacaaagcacaattgtaagcaaaatactcagatccttgactccaaaatttaactacgtggtttgttcgattgaggaatcaaacgatctgagtacattgagtattgatgagctccatgggagtctacttgttcacgagcagaggctgaatgggcatgtacaagaagagcaggcgttaaaggtgactcacgaggaaagaccaagtcaaggaaggggtcgtggagtgttccgaggaagtcgtggtagaggaagaggaagaggaagaagtggtactaatcgtgccattgtggagtgctacaagtgtcataatttggggcattttcagtatgagtgcccagaatgggaaaagaatgcaaattatgcggagttagaagaagaagaggaactgttattgatggcgtatgtggagcagaatcaggcaaacagagatgaagtatggttccttgattcagggtgcagcaaccacatgactgggagtaaggagtggttttcagagttagaagaagggttcaaccgtactgtgaagcttggaaatgatacgagaatgtctgtggtggggaaagggagtgtgaaagttaaagttaatggtgttactcaagtcatacctgaagtttattatgttccagagcttaggaacaacttgttgagtcttggacagctacaagagaggggcttagcaattctaattcgtgatggaacttgcaaggtgtatcatccgagtaaaggtgcgattatggaaaccaacatgagtggtaatcggatgttctttcttctagcttccaaaccgcagaagaattctttatgcttacaaacagaagaggtgatggataaggagaaccacttgtggcattgccggtttggacatctgaatcaagaaggattaaagcttctcgcacacaaaaagatggtcattggactgcctatactgaaagctaccaaggagatttgtgctatttgtttgaccggaaaacagcatagagagtcaatgtcgaagaaaacttcatggaaatcatcgacacagcttcaattggtgcattcagacatatgtgggcctatcacaccaatttcacacagtggcaagaggtacattttaagcttcatcgatgattttactcggaaaacatgggtctattttcttcatgaaaagtctgaagcgtttgccacattcaagatcttcaaagctagtgtagaaaaggagattggtgcgtttctaacttgcttaaggacagatcgaggtggagagtttacttcgaatgaatttggagaattttgtcgatctcatggcatctctaggcagttgacagcagcgtttacaccacaacaaaacggagtggccgagagaaagaataggacgattatgaacgcagttcgatctatgctaagcgagaggcaagttcccaaaatgttttggtctgaagcgaccaaatggagtgtgcacattcagaaccggtctcccacggcggcagtagaaggaatgacacccgaagaggcttggagcggtagaaaaccagtggtagagtattttcgcgtgtttgggtgcataggatatgtgcacataccagatcagaaaaggagtaagttggatgataaaagcaagaaatgtgtttttttgggagttagtgaggagtcaaaagcatggaggctttatgatccagtgatgaagaaaattgtgataagtaaagatgtagtcttcgatgaagacaaaagttgggactgggatcaagctgatgtagaagcaaaggaagtaacattggagtgcggagatgaagatgatgagaaaaattcagaggtagttgagccaatagctgtggcatctccaaatcatgtgggtagcgacaacaatgtgtcatcgtcaccaatcttagctccgtcgagtcctgctccgagtcctgttgctgcaaaagtaacacgagaaaggagaccaccgggttggatggctgactatgaaactggagaaggagaagagattgaagaaaatttatctgtcatgttgttaatgatgatgacggaagctgatcccattcagtttgatgatgcagtgaaagataaaatctggagagaagcaatggagcatgagatcgaatcaattgtgaagaataacacatgggagctaaccacattgcctaaaggttttacaccaattggcgtaaaatgggtgtataaaaccaagctgaatgaagatggagaagtcgataaatacaaggcgaggttagtagctaaaggatatgcacagtgttatggtatagactacaccgaagtgttcgctccagtcgcaaggcttgatacagttcgcaccattcttgccatctcatctcaattcaattgggagatctttcaattagatgtcaagagtgcctttttacatggcgagctcaaggaggaagtgtacgtaagacaaccggaaggattcataagggaaggagaggaagaaaaagtttataagctaaggaaggcattgtacgggctgaagcaggcaccacgagcttggtacagccggattgaggcttatttcttgaaagaagagtttgaaaggtgtcctagtgagcatacgctttttacaaagacaagagtaggtaatattttaattgtcagcttatacgttgatgatttaatatttactggaagtgataaagctatgtgtgatgagtttaagaaatcaatgatgctggaatttgaaatgtcggatttgggaaagatgaagcatttccttgggatagaagtgaaacagagtgatggtgggatttttatttgtcaaagaagatacgctcgggaggttttagcaaggtttggaatggatgagagcaatgctgtgaaaaatccaattgttccgggaacaaagcttacgaaggatgaaaatggcgagaaagttgatgaaaccatgttcaagcagttggttggaagtctcatgtatttaacagtgacaaggcctgacttaatgtatggagtatgtttgataagtcgattcatgtctaatccaaggatgtcacattggctcgctgcaaaaaggatcttaaggtatctaaaaggtacggttgagcttggtatattttacaggagaagaaagaataggagcctgaagcttatggcatttacggacagtgactatgccggagacttgaatgatcggaggagcacgtcgggtttcgtttttttgatggcgtccggagcgatctgctgggcttcaaaaaaacaaccggtggtggctctttctacgaccgaggccgaatacatagctgcagcattctgtgcgtgtcaatgtgtttggcttagaaaagtgttagagaagcttggagcagaagaaaaatctgcaactgtgattaactgtgacaacagctcaaccattcaattgtcaaagcatccagttcttcatgggaaaagtaagcacattgaggtgagatttcattatctcagagacttggtgaatggtgacgttgttaagctggagtattgcccaacagaggatcaagttgcagatatctttacaaaacccttaaagctggaacagtttgagaagctgcgtgcattgcttggaatggttaatatgtctgaagtaagctga

SEQ ID NO: 2815 - DNA, 3924 bp, Arabidopsis thaliana
  Clone ID: AT_F16J10.C1.o6.tg
atggaggctactctccgagtgcataaagtttgggaaacaatcgatcctggatcagatgacatggagaagaatgatatggctcgagctcttttatttcaatccgtacccgaatcaactatcttacaagtcggaaaacacaagacctctaaagccatgtgggaagccatcaagacaaggaacctcggtgctgaaagggtaaaagaagcaaagctacaaactcttatggcagagtttgatagactaaatatgaaagataatgagacaatcgatgagtttgtagggagaatatctgagatttctacgaaatcagaatctcttggagaagaaatagaagagtcaaagattgtgaaaaaatttctgaaaagcttgccacgaaagaagtatatacatatcattgcagcattagagcagattctcgatctcaacacaaccggatttgaagatatagtaggaaggatgaaaacatatgaagatcgggtttgtgatgaggatgattcaccggaggaacagggtaaactcatgtatgcaaattcagaatcatcttatgatacaagaggaggaagaggtagaggtcgaggtcgttcttctggcagaggacgtggaggatatggttatcaacaaagggacaagagtaaagtcatctgttatagatgtgataaaacaggacattatgcatctgaatgtctagatcgtttgctcaaacttattaaagcgcaagaacaacaacaaaacaatgaagatgatgatgaaattgagtcgcttatgatgcatgaggtggtttatttgaatgagagaagcgtgaagccaaaggagtttgaagcttgctcagataatagctggtatttggataatggtgcgagtaaccatatgacaggtaatcttcagtggttctccaagttgaatgagatgatcacaggaaaggtgagattcggtgatgattctcgtattgacataaaagggaaaggttcaattgtgctcatcaccaaaggaggaatacgcaagacattgactgatgtctactttataccggatctaaaaagcaatatcattagtttgggacaagccactgaagcaggctgtgatgttagaatgaaggatgatcaattaacgttgcatgatcgtgaagggtgtctgttactaagagcaacacgctccagaaacagactttacaaagtcgatttaaatgttgaaaacgtgaagtgcttacaactcgaagcagcaactatggtaagaaaggaattggttatcggaatctctaatattccaaaggagaaagagacgtgtggttcatgcctccttggaaaacaagcaaggcagccattccctaaagcaactacttatcgagcatcacaagtattggaacttgttcatggtgatctttgtggtccgataacacaatctacaactgctaagaaaagatacatactcgtgctgatcgatgatcacactcgttacatgtggtctatgctattgaaggagaagagtgaggcatttgaaaaattcagagatttcaagactaaagttgaacaagaaagtggagttaagatcaaaaccttcagaacagataaaggaggagagtttgtctctcaagaatttcaagatttctgtgcaaaagaaggcatcaacagacacttaaccgctccatacacaccacagcagaatggagttgttgaaaggagaaatagaacgttgctaggtatgacaagaagcatcttgaagcacatgaaaatgcctaactatttgtggggagaagcagtaaggcactcaacctatatcatcaacagagtaggaacaagatctttgcagaaccaaacaccatatgaagtttttaagcaaagaaagccgaatgtagaacacttacgtgtatttggatgtattggttatgccaagattgaaggtccacatttgagaaagcttgatgataggtcaaagatgcttgtttatcttggaactgaaccaggctccaaagcatatcgtcttcttgatccaactaaccgcaaaattatcaagtggaacaattcagattctgaaactcgggacatctctggaacattctcacttaccttaggagaatttggaaacaatggaattcaagaaagtgatgatatagaaacagaaaaaaacggagaagaaagtgagaacagtcacgaagaagaaggagaaaacgaacacaatgaacaagaacagattgatgctgaagaaacacaaccctcacatgctactcctctgccaacattaagaagatcaacaagacaagttggaaaaccaaattatttggacgattatgtcttaatggcagagatcgaaggcgaacaagttctattggcaattaatgatgaaccatgggattttaaagaagcaaacaagttgaaagaatggagagatgcttgcaaagaagagatcctgtcaatagagaagaacaaaacttggagcttaattgatcttccagttagaagaaaagtcatagggttaaaatgggtttttaagatcaagcgaaattcagatggcagcataaacaagtacaaggcaaggttagtagcaaagggttatgttcagaggcatggtattgactacgatgaagtatttgctcatgtagctcgtattgaaacaattcgagtcatcattgccttagcagcatcaaacggatgggaagtacatcacttagacgtcaagaccgcttttctccatggggaactaagagaagatgtttatgttacacaacctgagggcttcacaaataaagacaatgaagggaaagtctacaaattacacaaggctctttatggtttaaaacaagcacctcgtgcttggaacactaagctgaacaaaattcttcaagaactgaattttgtaaagtgttctaaagaaccatcagtgtacagaagacaagaagaaaagaagcttctcattgtggctatttatgttgatgatttacttgtgacaggctctagcttggatctaatactctgtttcaagaaagatatggctggaaaattcgaaatgagtgatctgggacagctcacgtactaccttggcattgaagttctccatagaaagaatggcatcatattaagacaagagaggtatgcaatgaaaattatagaagaagctggaatgagtaactgcaacccggtcttaataccaatggcagcaggattagagctctgcaaagcacaagaagagaagtgcatcaccgaaagagactacagaagaatgattggatgtctgagatacatagtgcatactcggccggatctctcttattgcgttggtgtactaagcaggtatctacaacaaccgagggaatcacatggaaacgcactgaagcaagttctaaggtatctcaaaggaactatgtctcatggtctgtacctcaagagaggattcaagagcggattagtaggctatagtgatagtagtcatagtgcggatttggatgatggaaaaagcactgccggtcatatcttctatcttcatcaatgtcccattacatggtgttcacaaaaacaacaagtagtggctctttcatcttgtgaagcggagttcatggcagctactgaagcagccaagcaagccatatggttacaagacctattcgcagaagtgtgtgggacaacaagtgagaaggtgatgattcgagtggataacaagtcggcgattgctcttactaagaatcttgtctttcatggtaggagtaaacatattcatcgaaggtatcatttcataagagaatgtgttgagaataacttagtcgaagtggatcatgttcccggagttgagcaaagagctgacattctaaccaagccacttggaaggattaagttcagagagatgagagaactagtaggagttcagtgtgtgttggaagatgacttcaagcttaaaggggagtttgttgggataagcatgaagtcaataaattag

SEQ ID NO: 2816 - DNA, 1248 bp, Arabidopsis thaliana
  Clone ID: AT_MAC12.C1.o12.tg
atgcttaacggcacaatgcagaccggagattgcttccgatgccgtcaggctggccactggatcaacgattgtcctctcaaatcctacaccgatgatcctccaccggcgatccaatgcccatgcggcggaggtttctgtgaaatcaaggtcgcgaatactcgagaaaatcccggaaggaagttctacaagtgtccaacggctcagaattgctgtttcttcaaatggtgtgacaaagtaaccgacgaagatatcaaattccgtcctgccttcaccatcccgatttgttcctgcggtgctggaccttgccggagagttaaagacgtttccggtagagcttacctgatatgctgcatcaaaaagggatttggagcttgtggattcttcaagtgggaagatgttgagatgattcctagttgtgatgttatggatgagattgatttttgggttgaagctgatcaaattttgagtgatgttgagagtagcttacaggctcgtggtggtgttataccggaaattgcaaaccaaatggcatcagagaaagaatgtcaagcttctgttagtggtatagaggatgattgtgtagtagaatgtcaagattctgttagtgcagaggatgattctacattagaaaatttggattccatttcaatgtctgtttctgatgtacactctactgctctgaaccaaggtatctctctgtttgatccggttacgagcgaacctgaagagccatggaaaaagactcagaatggtgatcagccaacaaatagtgctctttctaagttgagtgtggatgaagcgatgagtgatttgatcagagatacggtctctagtggttctgttgtgatacatggaaggacaaaccatgagcaacctgaaattgatggagctgagtggtcattcccttgcttgcagaacctaattgatcagtacaactcagagaagcttcaattggagagtatttcagggaaacatgtacaaatgttgagtgaatttatggcttcgtacaggcgactaaggttacttcatgagaaaactagtcatctcaggaaaactttacttgaaacagagaaggagatggtttgttgtgaagctgagacattaaaatttggagcaagttgcagggaagtggctggagaaatggctgagtctcagaagaggatgcaggaaactgcagataaactaggaaaagaagtagaagtgtttaagcaaaatgagtttgttggtctaaagagaagaagaacctga

SEQ ID NO: 2817 - DNA, 1776 bp, Arabidopsis thaliana
  Clone ID: AT_MWD22.C1.o23.tg
atggaatccatcatggaagaagctgatagttacattgagtatgtatcagtggcggagcggagagcgattgcagcgcagaagatacttcagcggaagggaaaagcttcggaattggaagaagaagctgacaaggaaaagctcgctgaagctaaacctagtttacttgttcaagcaactcagctcaagcgagatgtacccgaagttagtgctactgagcaaatcatcttacaagagaaagagatgatggagcatttatctgataagaagacgcttatgtctgttcgtgaacttgccaaaggtatcacttatacagagcctctcttaactgggtggaaacctcctttgcatattaggaagatgtctagtaagcagagagatttgattaggaagcaatggcatattattgttaatggtgatgatattcctcctcctattaagaactttaaggatatgaagtttcctagacctgttctcgatactctcaaggagaaaggtattgtgcagcctactcctattcaagttcagggtcttcctgtgattttggctgggagagatatgattgggattgctttcactggttccggaaagactttggttttcgtgcttcccatgatcatgattgctctccaagaagagatgatgatgcctattgctgctggtgaaggtcccattgggcttattgtttgcccttctagagagcttgctaggcagacttatgaagtggttgagcagtttgtggctcctttggttgaggctgggtacccgccattgaggtcgttgctatgtattggaggtattgatatgagatcccagttggaggttgtcaagagaggtgtccatattgttgttgcaacccctgggaggttaaaggatatgctcgccaagaaaaagatgagcttagatgcttgcaggtacctgacactagatgaggcagataggttggttgatttgggtttcgaagatgacataagggaagtctttgaccactttaagtctcaacgtcaaacactattgttctctgccacaatgcccacaaagattcaaatctttgccagaagtgctctggtgaaacctgtgacagttaatgtaggaagagctggagctgcgaatctggatgtgatccaggaggtagaatacgtcaaacaagaagcaaagattgtttacctcctcgagtgtctacagaaaacctctccgccggttttgatattctgtgagaacaaagctgatgttgatgatattcacgagtacttgttactgaaaggagtggaagcagtggccatccatggaggaaaagatcaagaagacagagagtacgcaatctcttcgtttaaagctgggaaaaaagatgtgttggttgcgactgatgttgcttcaaagggtctagatttccctgatatacaacacgtaatcaactacgacatgccagcagagattgagaactatgtgcataggataggacgaacaggtcggtgtggtaaaactgggatagcaacgacgtttataaacaagaatcaaagcgaaaccactctgctggatttgaaacacttgttgcaagaagctaaacagaggattccacctgtccttgctgagctgaatgatccaatggaagaagcagagaccattgctaatgcaagtggtgtcaagggttgtgcctattgtggtggtcttggacatcgtatccgagactgtccaaaacttgagcaccagaagagtgtcgccatttctaactcaagaaaagattattttggctcgggtggctacagaggagaaatataa

SEQ ID NO: 2818 - DNA, 996 bp, Arabidopsis thaliana
  Clone ID: AT_F1N21.C1.o3.tg
atggaggaagacatggatctaacagaagatgatttcagaaatgtgtctggccagttttcaggacaagcatcgatcgtggaggttggggatgctgttgatgtgagagtcgaaaccgtgaaagtagatgatcaagaacaagtactagaagctggtgatgagacatactttcctgctttgcgtgtgggattgcagaagacatcatctgtatcattttggtttgactaccaaactggtcacagttcttcgaagaagtctgttccagtggaaagtagcactactcctctttataaccgtggatttacaattggtttagattcaggttcaaataacgtggaaggaggcttggagattattgatgatcctccacgttgcttcaactgtggcgcatacagtcattctattagagaatgtccaaggccttttgatcgatcagcagttagtaatgctcggaggcaacataaaagaaaaagaaatcagactcctggatcccgtctaccatccagatattatcagagccttcaacgtggaaaatatgatggcttgaagcctggctcacttgatgcagagacgcgtaagcttctcggtctaaaggaactcgatcctcctccatggcttaacagaatgcgagagattggatatccaccaggatattttgctgtagaagaagacgatgatgatcactcgagaataactatatttggtgaggaagagactaaagaagaggaagaagttaagactgaagaaggtgaaatcttggaaaaagctagccctcaagagccaagaaagataatgacagttggatttcccggtattaacgcacccattccagaaaacgcagattcgtggctatgggaacagaggaatagtaacacaggacatactaattatcataatcaccttcgaccacaatatgagatgggccctctaggtattcaactgtcttcaagctttcctccaatgcatggcattagatatgatcataggttcggtttatga

SEQ ID NO: 2819 - DNA, 4506 bp, Arabidopsis thaliana
  Clone ID: AT_F9B22.C1.o5.tg
atgtcagaaaaagaaggagagattacctctggaagcacaacaaagatgggtgcatctggtggttctcgtgttgattccctgatggtgtctccgtacacattggcaagctcagataatccaggagctgtgatctcgtcggtcgagctcaacggtgacaactacaaccagtgggcgacggagatgttaaacgcactccaagcaaagcgtaagacaggcttcatcaacggtacgataccgagaccaccccctaacgatcccaattatgaaaattggactgcagtcaattcaatgatagtgggttggattcgcacttctattgaaccaaaggtgaaagcgactgtcactttcatatctgatgctcatctgttgtggaaagatttgaaacaacgtttctctgtgggaaacaaggtgcgtattcatcagattagagctcagctttcgtcatgtcgtcaagatggacaagctgtcattgaatactatgggcgtttgtctaatctgtgggaagagtacaatatctacaagcctgttacggtgtgcacttgtggattgtgtaggtgtggagcaacctctgaaccgacaaaagagagagaggaggagaaaatccatcagttcgtgcttggtcttgatgaatccagatttggtgggttgtgtgctacgcttatcaatatggatccactcccttctcttggtgaaatttactcaagagttattcgtgaagaacagaggttggcttcagttcatgtgcgtgaacaaaaggaagaggcagtggggttcttggctcgacgtgagcagctcgatcatcactcccgtgttgatgcttcttctagtcgatctgaacacactggtggaagtagatcaaattccataatcaagggccgtgtcacgtgctcaaactgtggacgtacgggacatgagaaaaaggaatgttggcagatcgtgggttttccagactggtggtcggagaggaatggtggtcgtggttcaaatgggcgaggtcgtggtggtcgtggctctaatggcggtcgtggacaaggtcaagtcatggcagctcacgctactagctccaattcctctgtttttccagaatttacagaggaacatatgagggttctcagtcaacttgtcaaagaaaagtcaaacagtggatccacttcaaacaacaattctgatcgcttgtctggtaagactaaacttggagatattattttggattctggtgcttctcaccacatgactggcacgctttctagcttaaccaatgtggtaccggttccaccatgtcctgtgggattcgccgatggaagtaaagcgtttgctttaagcgtgggagttttgacactttcgaacacagtctcgttgactaatgttctttttgtgccttctttgaactgcactttgatttcagtttctaaacttttgaaacaaacacaatgtctcgccactttcactgatacactttgcttcttacaggaccgttcttcgaagactttgattggaagcggtgaagagcgtggtggtgtgtactatcttacggacgtgactccagcgaagattcatactgcaaatgtcgattctgatcaagcattatggcatcaacgtttaggacatccgagtttctcagttctttcgtctttacctttgttttcaaaaacttcatctactgttacttctcattcatgtgatgtgtgtttccgagctaaacagacgagagaagtttttccagaaagtattaataaaacagaagaatgtttttctttaattcattgtgatgtatggggtccatatcgagttcccgcttcttgtggtgcagtttatttcttaaccattgttgatgactactcaagagcggtatggacctatttactgcttgagaaatctgaggtgcgacaggttctcacaaattttttaaaatatgcggagaaacagtttggaaaaactgtgaagatggttcgtagtgacaatgggacagagttcatgtgcctctcttcttatttccgtgagaatggtatcattcatcaaacatcatgtgttggtactccacagcaaaatgggcgggtggaacgcaagcaccgtcatattctcaatgttgcgagagctttgttgttccaagcaagcttacccattaagttttggggtgaaagtattctcacggcggcatacttaataaatcgtactccatcttccattctctctggtcgtacaccatatgaagttctccatggcagtaaacccgtttattctcagttgcgtgtatttgggtcagcatgctatgttcatcgagtaacacgtgacaaagacaaatttggtcagcggagtcgctcttgtatttttgttggctatccgtttggtaaaaagggctggaaggtttatgacattgagcgcaacgaatttttggtgtcaagagacgttatttttcgtgaggaagtgtttccttatgctggtgtcaactcctctactcttgcgagcacatcacttccgacagtttctgaagatgatgattgggcgatcccacctctagaggtgagggggagcattgattctgttgaaacagagagggtggtgtgtaccactgatgaggtcgttcttgacacctctgtttccgactccgaaattccaaatcaagaatttgtgcctgacgacacaccgccgtcgtctcctttgtctgtatctccttccggttctccgaatactcctacaacaccaatagttgtgccggtggcaagtccgatccctgtgtcaccacctaaacaacgaaagagtaaacgtgctacacatccgcctcctaagctcaatgactacgttctctacaatgctatgtacacaccatcgtctatacacgctcttcccgctgatccatcacagtcttctacggtcccaggtaaatctttgttcccgttaaccgattatgtctctgacgcagctttctcttcatcacatcgtgcttatttggctgccattaccgataatgtggagcctaagcattttaaggaagctgtccaaattaaagtatggaatgacgctatgtttactgaagttgatgcgttagaaattaacaagacatgggacatagtcgatttgccaccaggaaaggtcgctattggaagtcaatgggttttcaagactaaatataattcagatggaacggttgaaagatataaagctcgtcttgtggttcaagggaacaagcaagttgaaggagaagattacaaggagacttttgcgcctgttgttcgaatgactacggttcgcactcttctccgtaatgttgctgccaatcaatgggaagtttatcaaatggatgttcataatgccttccttcatggtgatcttgaagaggaagtctatatgaaacttccacctggatttcgtcattcacatccggataaagtttgtcgtcttcgtaagtcattgtatggtttgaaacaagctcctcgatgttggttcaagaagctgtccgattctctcttacgttttggatttgttcaatcatatgaagactactcacttttttcgtatacacggaacaatattgagcttcgcgtgttgatatatgtggatgatcttttaatttgtggtaatgatggatacatgcttcaaaagttcaaggattacttgagtcgctgtttttctatgaaggacttgggcaaattaaaatactttctcggtatcgaagtaagtcgtgggcctgaagggatcttcctctctcagcgtaagtatgctcttgacgttatagccgatagtggaaatcttggttctcggcctgcacacactccattggaacaaaatcatcatcttgcttcagacgatggacctcttctctccgatcccaagccttatcgtcgtcttgttggccgcttgctctacctactacatactcgtcctgagttgagttattcagttcatgtgttggctcagtttatgcagaatcctagagaagctcacttcgatgctgcattgcgtgtggttaggtatttaaaaggttctcctggtcaaggcattttgttaaacgctgatccggatttaacgttagaggtgtattgtgattctgattggcagtcatgtcctttaactcgacgatcaattagtgcgtatgtggtgttgcttggtggttcccctatttcatggaagacgaagaagcaggatacagtttcacactcctcggctgaagctgaatatcgtgctatgtcctatgctcttaaagaaatcaaatggctacgtaagttgttaaaagaattaggcattgaacagtctactccagctcgtttatattgtgacagtaaagcggctatacacattgccgctaatcctgtgttccatgaaaggaccaaacacatcgagtcggattgtcattcggttcgcgatgcagtacgtgacgggatcatcacaacccaacacgttcgcacaactgaacaacttgccgatgtttttacaaaggctctcggtcgtaatcagtttctctacttaatgtccaagttgggcgttcagaatcttcacactccaacgtga

SEQ ID NO: 2820 - DNA, 1434 bp, Arabidopsis thaliana
  Clone ID: AT_MBB18.C1.o15.tg
atggaaactgaggatgtgcttgacataccagcttcaagcaattttggctctgaagtaaagaaaaatagccttgaatctgggaatgggtcacctgaggctaattctttagttggtaatgatgagaatgtgaaaggaaatttagatttggatttaacagaagagaatttgagaattgtcggtggccaagagtctggggaaatactaacagagcaggttagtgatgtgttcaatgcgagtgtggaaagtgtggcggtagatgagaaattgggtatccaaaaggagacactagttcacagcaccactttggatgatcaagaacaactattcgaatctggtgaagagacatgtttccccgccatacgtgttggattgcagaagacttcgtctgtgtcattctggatcgacaaccaaactggtcataagccgttggaagattttgttctagtggaaagtagcaccactcctctttatgaccgtaaatttgctataggtttaaattcagcagatggctcaagaaacgtggaagggggattggagattattgatgatgatcctccacgttgcttcaattgtggtggctatagtcattctctaagagaatgtccaaggccttttgatcgatcagcggttaatagtgctcggaagcttcagaaatctaaacgaaatcagaatagtagtgggccccgtctaccatcaagatattatcaaaaaactcaaactggaaagtatgatggcttgaaacccggcacacttgatgcagagactcgtcagcttctgaatctgggggaactagaccctcctccgtggctaaacagaatgcgagaaattgggtacccaccaggatacttagctccagaagatgatcatttgtctggaataactatattcggagaagaggtggagactcgggaggagatagagagtgaggatggggaaattttggaaaaagcaaaccatcctccagagccacaaatgaaaaagaccgtcgagtttccgggaattaacgctcccttcccagaaaacgcagatgagtggctttgggaagctgcaccttcacataggaacagcagcagaagcggccgatggcaacaacaaaaaacaagcagaggacatgattacagagacgatggtccgctcggcgttgaaccatcaagttatcctccaaggtatggcagtagatatgattacgggtatggttcaaacgaatatggttctaggtcaagaagtccaggcatagatagatctttatccgaaagaagtaagagggattattcttcttacgatgctgacttccgggagagagatagagatagagacaggaacagggatagggatagagacagagactgggatagggacagggacagagactgcgatagagacagggacagggacgatcgtgattggtcttatagattaagcagcaggagataa

SEQ ID NO: 2821 - DNA, 1392 bp, Arabidopsis thaliana
  Clone ID: AT_T24M8.C1.o9.tg
atggggaagcaaaagcgccgcaaaggctccctagccccggacccgtccccccctcgtagtgttggttcctcttcgctcgcttctgtctcttcagttgctttgccgatctctcagatccagccgtctgcaactctcccagatgcccaagctgccgtccctcagacagccttggccattccttctcctcctgttcctagatctggctcagatctggaaactttgcctataatcgatgtgacctcagcggttacccctgtaccggctggagctccttctgcggctacctctgttccagcggtagctccatcagtaccttgtgaagtgactccctctcggggtccgagtccttctcctgctactgcgccagctacacccgtcaaggttgttgtggcagacccagtaaacaagcctgaatctaacacagctgagcaagcaattccgggtatcactgtctcaagaatggagggtaatgccttccttttttgcatccccaacgtccaaaccagaactcgtgtcctcagccagcgtctttggcagatcgacggacagactatgtttgttgcaaagtgggagcccggtcttactcctgtgaagccggagttgactactgccccgatttggcttgaactgaggcacgttccttttcaattctttaatgacaatggccttgagcacattgctagtttggttggcgagcccaaattcctccatcctagtactgccaacaagactaaccttgaagtggcaagggtcttcactataattgatccgaggaaacctcttccggaagcagtcaatgttcactttgcttcaggagatattaggcggatcgaggtctcgagcccttggatgccgccagtctgtgctcactgtaaggaggttggccacagcttgaggaaatgtaaggtggctcctatcacctgcaaggcttgcaactccactttgcacctagctgatgcttgtccccgtgaccagccccaaggggtcaaaaagaggcataggcgcaggcgctccaaaacccctaagccagttgtcgaggaaggcgattggaatactgttgccccccgtaacaggcgctcaactaggagtagcgttgtcctgaccattggcccgcctctttcggtcccagacgccaatgccgctgctatggctggctctagtaaggaagcccagaggcccaatcctatcacgggtaaagctgcttcctttaaaggcaaagggaaaagtattgtcgtggctaagagtaccacagtctcagaggcggactatgattcttctgatgtaccttctgacgatgtggatagtgatctggaaaatgaggagcaattcacagaggtgttgtctaagcgacagcagcgaagtgcgaggggcaaaggccccaaatcacactga

SEQ ID NO: 2822 - DNA, 2157 bp, Arabidopsis thaliana
  Clone ID: AT_T13B17.C1.o100.tg
atgggtgccgcagccggaggagcccaggtaccagtgcaggctccagttgcgccacgagtggcggaggtgcagcagagggctgcggttgctgaggaggttccatcttatttgaggatgatggagcagttgcaaaggattggcatcgggtatttttctggtggtactagtcctgaggaggccgacagttggaggtcgcgggttgagcggaacttcggttcgagcagatgcccggtggagtatcgggtggatctcgcagtgcattttctagagggggatgcacatttgtggtggaagagtgtaactaccaggaggagacaggcgaatatgtcttgggcagatttcgtggctgagtttaatgccaagtactttccgcaggaggcgctcgaccgtatggaggcgcattttcttgagctgacacagggtgagcggtcggttcgggagtatgaccgggagtttaaccgactcttggtgtatgcggagtgtcgcagtacgcggattccagtagtacaaccgaagaagactcatcagcaggtggcacctagcaagggcggcaagcctgcgcaagggcagaagaggagttgggatcatccttccagagctggacagggtggtcgtgcaggatgttttttttgtgggagccttgaccacaaggtagcggattgcacgcaacgagctgagacgagggagtactaccactgcaggaagaggagacatctcaggccgaattgtcctaagttgcagcggatggcagtggcagtagtacatgcggcagtgcagcaaggagcgcaggtgcagcaaaatgtgcagcagttagcacatattgcaccggcaccacagggttacactacgcgtgagataggcgttaccaacaacagagcgatcactgccgtcaaggttgttggagggcagtttctagcggttctggggagagctaagggtgtggatattcaaattgcacgagagtcgatgccagcaaatctgtttctcagccctgaagagttgtatgatgttattctgggaatggattggttggattattacagagtacatcttgactgccaccgtgggagagtttcttttgagcggccaaaagggaggttgatttatcaggcagtgagacctaccttagggagtctcgtcatctcagcagtgcaggcagaaaaaatgatcaaaaaggactgcgaggcttacttggtgacgatatctatgaagagtgatggagaagctacgggagcagaagctggagtttcagtggatctagagaagattgaggctatcaaagactggcctagaccgacgaatgccactgagatcaggagttttcttgggttggcagggtattacaggaggttcgtcaaggggtttgcgagtatggcaccgccgctgactaagctgacaggaaagaatgttccttttgtgtggtcaccggagtgtgaggagggtttcgtgagcctgaaggagatattgacgagtacaccagtgttagcattgccagagcatggagagtcttacatggtgtatactgatgcctcgagagttggtttgggttgtgttctgatgcagcgtgggaaggttattgcctatgcatcgcggcagttgaggaagcatgagggcaactatcctactcacgatttggagatgtctgcggtgttcacggatcataagagtctgaagtatatcatcactcagccagagctgaacctgaggcagaggcgatggatggagctggtggctgattatgatctggagatagcctaccatcatggtaaagctagtgtggttgcagatgcgttgagtcgtaagcgcgtgggtgtggcaccagggcagagtgttgaggccttggtgagtgagattcgtgctttgcggttgtgtgctgtggcacgggagccattgggattggaagctgtggatcgagtagatcttctgagtagagttcggttggctcaggagaaggatgaggggttgattgcggcttcaaaagcagagggctctaagtatcagttcgcagctaatgggactatccttgtgcatgggcgagtttgtgtgcttaatgatgaggagttgcgacgggagatcttgagtgaggctcatgcgagcatgttttccattcatccaggagcgactaagatgtaccgagacctcaaggagtactattag

SEQ ID NO: 2823 - DNA, 1758 bp, Arabidopsis thaliana
  Clone ID: AT_T12C24.C1.o19.tg
atgttgaagcggtctaccattgcagctttgtttgaggaaaggctgagagttaatccaaagatgacaaaatatgagatggttgctgagataaagagagagtacaaattggaagtaactccagatcagtgtgctaaggcgaaaaccaaagttctaaaggcaagaaatgctagtcatgatacccatttttcaaggatatgggactatcaagcagaggtattaaatcggaacccaaacagtgactttgacatcgagacaactgcgagaacgtttattggaagcaagcagaggttttttcgcttgtatatatgttttaattctcaaaaggtttcatggaaacaacattgtagaccagtcataggcatagatggagcgtttttgaaatgggacataaaaggtcatcttcttgctgcagttggaagagatggtgataataggattgttcctctagcttgggcagtggtagaaatagaaaacgatgataactgggactggtttttgaagaaactgtctgaaagtttagggctttgtgaaatggtgaatctagctttaatttcagataagcaatcgggtcttgtcaaagcaatccataatgtactgccacaagcggagcatcgccaatgttctaagcacataatggataattggaagagggacagccatgatatggagctacaacgtttgttttggaagatatcccgcagttacaccatagaagagttcaacactcatatggcgaatctaaagagctacaatcctcaggcttatgcatctctgcagcttactagtcctatgacctggactattagacaagccagaagaaagccgttattggatatgctagaagacatccggaggcaatgcatggtcagaactgcaaagaggtttatcatagctgagaggttaaagtcaagatttactccgagagctcatgctgagattgaaaaaatgattgctggttctgcaggttgcgaaagacatttggcgagaaacaatttgcatgagatatatgtgaatgatgttggatactttgttgatatggataaaaagacttgtggttgcaggaaatgggagatggttggaatcccatgtgttcatacaccatgtgtgataataggcagaaaagaaaaggttgaagactatgttagtgactactacacaaaggtaagatggagagagacatacagagatggtattaggcctgtccaaggaatgccattgtggcctagaatgagtaggttgcctgtcttaccgccaccttggagaagaggcaatcctggaagacaaagtaactatgctagaaagaaaggaagatatgaaacagcctcttcttcaaacaagaacaagatgtcacgggctaatcgaataatgacatgctctaattgtaagcaagaagggcacaacaagagctcatgtaagaatgctactgtcctgttaccaccaccgagaccaagaggtcgaccaagtctaaatcaggagcacaatcttatcaagaacaagcagtttcaggtcatggatcacaagaacaagcagcttcgggtcatggatcacaaggacatggttcacaaagacatggatcacaagaacaagcagcttctggtcatggatcacaaggacatgggtcacaaggatcaagagctcatggaccgcagagacaaagggcatcacaaagacaaagatcaagagctcatgttagatcagaagcacaagcacaatctcaaccacaagcgcaagcccaagaacaaagacttgctgggttag

SEQ ID NO: 2824 - DNA, 762 bp, Arabidopsis thaliana
  Clone ID: AT_T32A11.C1.o20.tg
atgcatcgttctgtttcaaccaataatcccaatcgttacatctgtagtagaagacaacaaactcctcgacggatggccgaacaaacttgtagtcaaaatctggaatcaatcgtcgggtttaaaaaaaaggggccttcaacaaacttccacatgcctgcaggcattcttgcaaaaattgttagctatatagctgaaggtgagattggtgagttaaagaattggattatctccggaagggagggaatggtagctgtatcttcaccagatagccagaaatcggtgatttcaatgacagaatttcacattcctccgccgttgatggagatcatcgtaagcaaggttggtgaagatgttgttgatgcgttgaagaacttcttgctggctgggagagaggggagagatgcggttctttcaaagaaaacattagcatccgtacgaattgacaaaaaccatcatttcatgtggtggtcaatgcctcattcaaaatactacactttcttcaaaaagtgtcttgacgcgaataatctttatgcgaagtttgtagataatcataaagggctggcatatgaatcgactataggatactttcaaatgagatgccgttggaaggtgtgccatggtaaacgcaatggtggtttgctcgacttgaatgaaatgaaagtgtgcgtggtgcaaccaccttatcaaccgaacagagttggtaggccaaggtgtcgtagatgtaagaaggttgggcacatgttgagcacttgtacagagtaa

SEQ ID NO: 2825 - DNA, 1026 bp, Arabidopsis thaliana
  Clone ID: AT_T13B17.C1.o102.tg
atgtcgaagctcacaaacctcatgtacgctgcactcttggcatctggtgacaattaccttcaatgggcattggacaccaagattgagttaaagtctaagggactcgccgagtgcattgtggaaggaaatgagaaaacggagaggtcaaagtatcaggcgatctcaatcatacgccatcacatagcagagagcttgaaaaatcagtaccttacggtcgaggatccacttgagctttggcttgagttgaagaatcgatacgaccaccaaaagaccatacaactacccaaagcccaacatgattggcttaacctcaggatccaggattacaaatccgtggaggagtataactccgagctctttaagattgtctctatcctgaggctgtgtggtgagaaggtgactgagaatgacatgctcgagaaaactttctcgacctttcacgcgaataacgtactgcttcagcaacagtaccgtgcgaaagggtttacgacttacacaagtctagcctcctgcttgcttcttgctgagaagaacaatgagctgttactcatgaacagcgcattgagacctcccggatccacagccgtgcccgaagccaatagagccgaaatggccaaagcgcctaatgaacctcaggcgaccaaggaatccaactacgtccataggggtaaccctcacggccgtggccgtggcagaggacgtggtggaagaggtcgtggcaatttctacggccaaggaaaccactatggtggtagaggccgtgggaactatggccgaggtaggggtagaggccgcggtgttaacaaaccacgaggaaaggctaagtccgtgtgctataggtgtggcatggacgaccattgggcaaagacgtgcagaacctctaagcacctcattgaggcatatcaagagatgataaagcaaaagggacccgaagccaatttggttcatctcgatggtgaaggggattttgaccacgagaacgatgacctaatggattatgagacttcggacatcttgggagaatag

SEQ ID NO: 2826 - DNA, 2208 bp, Arabidopsis thaliana
  Clone ID: AT_C6L9.C1.o40.tg
atgggaaaaataaaagatcaaaaaggcaaggagcatgatcattctcagtgtcggagatacgttctccaatcttatctcctaagaacagagcacataagccctaattctactcgcaacatcaatatgatcacgcaggatgattctctatgtttgctctctatctctatttatactctgaattcttctcatgcttctctttggctcttcacacggtctgaggaagagagtgcagattttggtgagagtgaggatcctagtaagactgttcgtaagagaaagaagttgtcttcatcaaaactaggttttcggagacttgataaccagtcaaagaaggatcaacttttcaacgagcccttgtttactggcttctcaaatgttttactcagtgtctttaaaaaggattgtgtagcaaaatcatattttgctgctcctaaagaacctgcatctgtacctgtatcatctcctactcgagaagctgaaacagaaattaactcggcctctccagttacacaatctacagttcctgattctactaatcaagagagtacggttcagcgatcttcaggtcagcaaactgaacatttccaaggtgttgcacttaaattcgttttgcctggactaaacatcctcgagtacatgctatcaccacctccaagatcttcaccttttagaaccaatggcttcaccattcatcctgaaacatgggagacaggatcttacagaacacaaccttcaacttccaacaatacagaggaacttcattttcttgaggaaggtgtcaataccccggtaagatcaccggttactcaagattctgggggtttttcaggaagaacaagagccttggctcagcatcttaaagaacgttattctggatatctaagtttgaacaagatcttggaaggaaagacaagaaaaatagctgctcgaatgttctacgagacactgggtgaggttccggagatcgttcagaagatcattcaggaagtaagacagagtttgaaatcaagattgatggagatattgaggttgccattcaagaagcggttttcatggaatgaacgaaatagagctcttcacgagtttaaggttgatggaaacaaagaagtattgtacaagtcatctaaaggcaagcgatgttttgagtgcaaaggttttagacatatgtgttctgaatgtgcgaatttgatgaaggaaaaggagaagaaattcatcatgagtgattctgaaattgattcagatgatggtgaagaattgaagaatttagttgcctttacgacctttgagtctagtattgcgtcagcatctgcatcagggccaacatcagcgtctgcaacagggtctacatcagcgtctgcaacaggacctgcaactggaagtgataatgatcaaagtgatgatgatgatttaagtattagtgatgaagagtttgctgagaattacaaagctttatatgagcattgtgttaaggtagttgaggagaattcagtattaactaaggagaagctcaagttagaggctaaagttgttaaaacactgaaatttgctgcagagaaagaagaagaagcgtcacaacttgaagaaactcaaaagaatttgaggatgcttaataatggcacaaagaagttgggtcatattttgagtattggcaagactgataagtgtggtcttggatttaaaggaaatccttcaaaatcagatccggtgtttgtttatggtggtaaaatcacgtctgcatcaggaactgtgaaggaaactgcaactgtggcagagattgcatctgatacgagaactgattcgagaactgatacagagactacatccggtacaagaaaagttcaaaaattgcagagtgaacctcgacgagtttttcgaccggtttgtcatcattgtggagttgttgggcatattaggccaagatgtttcagattgttgagggagaaaaatcgattgatgaatgcttatgatgtgagatttcatggtcctaaatgttatcattatggagttcaaggacatatcaagaggaattgtttcaggttcattcgagaatgcagtcatgagggtttaaggcgcaacaaagtatgggttaggaaagatgattttcatggaagtggtggggagaatgatgatgtgtttggtgatgttgtgttggagttagaactgatgagttcacaacatagtcaaaaagggggagatttgaagatgtag

SEQ ID NO: 2827 - DNA, 999 bp, Arabidopsis thaliana
  Clone ID: AT_F8N16.C1.o20.tg
atgccggcgacagcaggaagagtgcgtatgcccgcaaacaatcgggtgcatagtagtgcagcgcttcagactcatggaatatggcagagtgcgattggttatgatccttatgcaccaactagtaaagaagagcctaagacgacacaacagaaaaccgaagatcccgagaactcgtacgcgagttttcagggacttttggctcttgctaggattacgggttcgaataacgatgaggctcgtggttcttgtaagaagtgtggccgtgttgggcatttgacgtttcagtgtaggaatttcttgagtactaaggaggataaggagaaagatcctggtgcgattgaagctgcggttttgtcggggttggagaagattaggagaggtgttggtaaaggtgaggttgaggaggtgagtagtgaagaggaagaggagagtgagagttctgattctgatgttgattctgagatggagaggattattgctgagaggtttgggaagaagaaaggtgggagtagtgttaagaagacgagttcggttaggaagaagaagaagcgtgtttctgatgagtctgattctgattcggattctggagataggaagagaaggcggaggtcgatgaagaagcggagttcgcataagagaaggagtttgagtgagtctgaggatgaggaagagggaaggagtaagagaagaaaggagaggagaggaagaaagagagatgaagatgattctgatgagtctgaggatgaagatgacagacgtgtgaagagaaagagtagaaaggagaagaggagaaggagaagccgtcgtaatcattctgatgattctgattcagagtcttctgaagatgatagaagacagaagcggaggaacaaagtcgcagcttcttctgactcagaagcaaatgtttcaggcgatgatgtttcacgcgttggacgtggttcttctaagcggtctgagaagaagagcaggaaacgtcatcacaggaaagagcgagagtag

SEQ ID NO: 2828 - DNA, 2265 bp, Arabidopsis thaliana
  Clone ID: AT_T11J7.C1.o3.tg
atgacaaataacgagctgattatgtcgggaaaccacgatatctcgtttaggcaggagcaatatatggaagctcgacagaacaatgaactttttactagtcatgattacaattttgctttggaaccattacaagagaccaacctgcagataggtgtttcccgtgagcaaaatgaggtttggaaccacggccaggaacatgcattggctctacaaaactcagggactcacagtgaagaaatacatgaaaagcaacttgtggaaggaaaagatgaggttgattctcaggaaaaccaaaatgaaagctatgaccatacttttgacctctcctttcctgataatgatgactcgggaacttcagagaatgataaacttgctttattagtttctcaggatctcaatgataatttacagttggcggtgggtcattgcatgaatagggatcccttacctggcctgaacataagcctttctcagcagctagagttggctcctcctatccttcaatgccggtctctgcaaacagctcctgagcacaatttgatcgttggtatggaattttctgatgtccttgcgtgtaggagagcactcagagatgcagcaattgccttacgctttgagatgcagactgttaaatctgacaaaactcgcttcactgctaagtgcaatagtgagggttgcccttggagaattcactgtgccaagcttcctggtctaccaacctttacaataaggactattcatgggagtcacacatgtggtggtatttcacaccttggtcaccatcaagcttcagttcagtgggttgctgatgctgtgacagaaaggctgaaagtaaatcctcattgcaaacccaaggagatactggagcaaattcatcaagttcatggaattacactaacatacaagcaagcatggaggggaaaagaacgtataatggctgctgttcgcgggtcatatgaagaagattatcgccttcttcctcgatattgtgatcaaattaggagaacaaatcctgggagcgttgctgtggttcatggaagcccagttgatgggagcttccaacaattcttcatttcttttcaagcatcaatctgtggttttctaaatgcttgtcgacctcttattggattggacaggactgttttgaagagcaaatatgtagggacattgctgcttgccactgggtttgatggagaaggtgcagtgtttcctttggctttcgctattattagtgaagaaaatgatagtagctggcagtggttcctctcagaattgcgtcagctgcttgaagttaattccgaaaacatgccaaagctgacaattttatctagtagagatcaatccattgtcgatggagtagatactaattttccaacggcgtttcatggcttgtgtgtccattgtctcacagaaagcgtccgtactcagttcaacaactccattcttgtgaaccttgtttgggaagcagcaaaatgtctgaccgactttgaatttgaaggaaaaatgggagagatagcccagatatccccagaagctgcctcgtggattcgtaacatccagcacagtcaatgggccacatactgctttgaaggaacaaggtttggacatctgactgcaaatgtttccgagtcacttaatagttgggttcaagatgcgtcaggtcttcctataatccaaatgttggagagtattcgtcgccaactaatgactctgttcaatgaacgccgtgaaacaagcatgcaatggtctggtatgctagttccatctgctgagagacatgtccttgaggctatagaagaatgtcgtttgtacccagttcacaaagcaaacgaagcacaattcgaggtcatgaccagtgaaggaaaatggatagtggatattagatgccgtacgtgttactgccgtggatgggagttatacggtttgccttgtagccacgcagttgcagccctcctcgcttgtagacagaacgtatacaggttcacagagagttacttcactgtagcaaattaccggcgaacttacgcagaaaccatacatccagttccagacaaaactgagtggaaaacaacagaacctgccggagaaagtggtgaggatggtgaagagattgttatcagaccacctagggatttaagacaaccaccacggccaaagaagaggagaagtcaaggagaggaccgtggacgtcaaaagcgggttgttcgatgtagccggtgtaatcaggctggccatttcagaacaacttgcacagctcctatatga

SEQ ID NO: 2829 - DNA, 726 bp, Arabidopsis thaliana
  Clone ID: AT_T13P21.C1.o20.tg
atgagtaagttttcatattttccttcaggatctgaagaccataatcgaaaagaattgtgtggtgattatgatgttgcagagatgataaacaatacttatgagttggaaagtatgaatctatatgttgttagggttgatgatccttatcttgatgatgttcttgttggagaagaggaagaagaagaggaacccaagaatgaagatgaacctatagacttgctgtttcaggatgctgtttcttgtacttgtagagcatatgatgtgagtggcattccgtgctgccatattatgtctgctatgtgggaggaatataaagaaacgaagctaccggaaactgttgtgtcagattggtattcaattgagaagtggaagctatgttacagctctttgttttttcctgttaatgggatggaattgtggaaaacccacattgatgttgttgttatgcctcctccagacagaatcatgccgggaagaccaaagaacaatgacagaatccgtgatccaactgaagatcgtccacctcaaaaagttccttctacacgtgaaaaacttcaaatgacttgcagcaactgtcaacaaatcggacacaacaaacgttcatgcaagcgtaaagcagtgccaaaaccatccaagaaacctcaaggacgaccaaggaaaaaacagaaaacaatggctgaagagaaccctatcactcagccaatacaatcttctcttcaaagttaa

SEQ ID NO: 2830 - DNA, 4242 bp, Arabidopsis thaliana
  Clone ID: AT_T4E14.C1.o12.tg
atgtctattccagaagaagtctcctctgcaacacatccacgtaccaatcaacaaccagatgtaaccaaagtgtctccgtacactctggccagctccgacaacccaggggccatgatttcctctgttatgttaaccggtgacaattacaacgagtggtcaacaaaaatgttgaatgcacttcaagccaaacgtaaaactggttttatcaatggttcaatctcaaaaccaccattggataatccggattatgagaattggcaggcggtaaactcaatgatcgtgggttggattagagcctccatagaaccaaaagtcaaatccacggtcaccttcatatgtgatgctcatcaactatggagtgaattaaaacaacgtttctctgtgggaaacaaagttcatgttcaccaaattaagactcagcttgctgcgtgtaggcaagatggacaacctgttattgactactatggtcgcttgtgtaagctttgggaagaatttcaaatttacaaaccaattactgtttgtaagtgtggcttgtgtacctgtggtgctactcttgaaccttccaaagaaagagaagaagagaagattcatcagtttgtgttaggactcgatgattcacgctttggagggctctctgctacacttatcgcgatggatccgtttccatctcttggagaaatctactctcgtgttgtgagagaagaacagagactcgcatcagttcagattagagagcaacaacagtcggcgattgggtttcttactcgtcaatcagaagttacagccgatggaaggactgattcttcgattatcaagtctcgtgaccgctctgttctctgctcacattgtgggcgaagtggtcatgagaagaaagattgctggcagatagtcgggtttcctgattggtggacagagcgaaccaatggaggtggacgaggatcaagttctcgtggtcgaggaggacgtagctcgggttctaataactcaggtcggggtagaggacaagtcactgcggctcacgctacaacctccaatctctcaccctttccagaattcacaccggatcagttgcgggttattacgcagatgattcagaataaaaacaatggcacctccgataaattgtctggtaagatgaaacttggcgatgttattcttgatacgggagcatctcaccatatgactgggcagctttctctcttgactaacattgttactatcccttcgtgttctgtgggatttgcggacggtcgaaaaacgtttgctataagcatgggaacattcaagctttcagagactgtgtctttgtctaatgttctttatgtcccagcgttaaattgctcattaatatctgtttccaagctagtgaaacagatcaaatgtttagcattgttcactgatacaatttgtgttttacaggaccgattttcgaggactttgattggaaccggggaggaacgtgatggagtgtattatctaacggatgcggctacaacaacggtgcataaagtggacatcacaacagatcatgctttgtggcaccaacgtttaggacatccaagtttttctgttctttcatctttacctttgttttcgggatcctcttgttctgttagctctcgttcttgtgacgtatgttttagagcaaaacaaacaagagaagtatttccagatagtagcaataaatcaacagattgtttttctttaattcattgtgatgtttggggaccatatcgagtgccatcttcatgtggagcagtttattttttaacaatagtggatgatttttcaaggtcagtttggacatatctactattggcaaagtcagaagttcgtagtgttcttactaattttcttgcatacacggaaaaacagtttggaaaatctgttaaaatcattcgcagtgataatggtacagaattcatgtgtctttcatcctactttaaagaacaaggcattgttcaccagacttcgtgtgtaggaactccacaacaaaatggtagagtcgagcgcaagcataggcacattctgaatgtttcaagagcactcttgtttcaagcatcactaccaatcaagttttggggagaagcagtcatgacagcagcttatttaatcaatcgtacaccgtcttctattcacaatggtctctctccctatgagttgctgcatggatgtaagccggattatgatcaattaagagtcttcggctctgcttgctatgctcatcgtgttacacgggataaagataagtttggtgagagaagccgtttatgcatttttgttggctatccatttggacaaaaagggtggaaagtatacgacttgagtactaatgaattcatagtctctcgtgacgtggtgtttagagaaaatgtgtttccttatgcaacaaatgagggtgatacgatctacacaccaccggtcacttgtccgatcacttatgatgaagattggttgccatttacgactctagaagacagggggagcgatgaaaattatttgtctgatccaccggtttgtgtcactaatgtttctgagtcagatacggagcatgatactccacaaagtcttccgactccagttgatgacccactttctccgtctacaagtgtcactccaactcagacgccaactaactcttctagttcaacatcaccgtctacaaatgtctctccaccccagcaagacaccactccgattattgaaaacactcctccgcgacaaggaaaacgacaagttcaacaacctgctcgtctgaaagattacattctatacaatgcttcttgcactccaaacactcctcacgttctctctccttctacatctcagtcctcgtcatcgatccaaggtaacttacagtatcctttaacggattatatttccgatgagtgtttttccgcaggacataaggtgtttcttgctgcaatcactgcaaatgatgagcctaaacattttaaagaagatgttaaagttaaagtctggaatgatgcaatgtataaagaagttgacgcactcgaagttaacaagacatgggacattgtcgatctgccaactggaaaagtagctattggaagtcagtgggtttacaaaacaaagtttaatgctgacggaacggttgaacgttacaaagctcgccttgtagttcaaggcaacaatcaaattgaaggggaagactacacggaaacctttgcaccagtggtaaaaatgacaacggtccgtactcttcttcgtctagtagctgctaatcaatgggaagtataccaaatggatgttcataatgccttcctccatggcgatcttgaagaggaggtgtatatgaaacttcctcccgggtttcgacactctcatcctgacaaagtttgtcgccttcgtaagtcactatacggtttaaaacaagctcctaggtgttggtttaagaaattgtctgatgctcttaaaagattcgggttcatccaaggttatgaggattactctttcttttcttattcctgtaaagggattgaacttcgcgtcttggtatatgtcgatgatttaataatctgcggtaatgatgagtatatggttcagaaatttaaggagtatttgggacgttgcttttccatgaaagacttaggcaagctcaaatattttcttggcattgaagtaagtcgtgggcctgatgctcctagggaagctcatttggaggctgcgatgcgcatagttcgttacttgaagggttcaccgggtcagggcattttgctgagtgctaataaggatttgactctcgaggtttattgtgattcggattttcaatcttgtcccttgactcgacgttcacttagtgcgtatgtggttctgcttggtggctcgcctatttcttggaaaaccaagaaacaagacacggtttctcactcgtctgcggaagcagagtatagagcaatgtcggttgctctcaaagagatcaaatggcttaacaagttgttaaaagaattaggtatcacactcgctgcgcctactcgtttgttttgtgatagtaaggctgctatatctattgcagcaaaccccgtctttcacgagcgtacgaagcatattgaaagggattgtcactcagttcgcgatgcggttcgtgatggcattataacaacacatcatgttaggacctcggagcaactagctgatattttcactaaggctcttggtcgtaatcaattcatttatcttatgtccaagttgggtattcagaatcttcacactccaacctga

SEQ ID NO: 2831 - DNA, 432 bp, Arabidopsis thaliana
  Clone ID: AT_F7F22.C1.o13.tg
atgcaagaaaataagaagatcgatgagaatattgatgatttcctaaagatcgtagtagatcttaatcatattcagattgaagtaagagatgaggttcaagcgatcttactgttgagttctttaccttctaggtatgatggtctagttgagacaatgaagtatagtaatagcagagagaagttaaggttaaatgatgtgatggttgcagcaagagataaagaaagggaaatgtctcagaataataggcttatagctgaaggtcactatgctcgcagaagaccagttggtaagaacaataatcaggggaataaaggcaagaataggtcttggtctaagtctgcggatggtaaaagagtgtgttggatttgtggcaaggaaaagcacttcaacgagcagtgttataagtggttagaaagaaacaaaccaaagtag

SEQ ID NO: 2832 - DNA, 1551 bp, Arabidopsis thaliana
  Clone ID: AT_T2L5.C1.o20.tg
atgtcgtctagcaaaggaagcaacaccgttagtctattgcacagtgttaatgtgcccaatcttgagaactccgctccgtcaagcagtactgacgatgaaagtttgtttgtggccatgaatgatcagtttatggcagaagatagtgattccactgagtctgacacatcgattgaatcagatccgtcagatgtttggaaattatttgcggtgccaaccgagaacgcgactgaggaacaagtgaatgatagtctgaacaatatgttgacgcaattctatgtgccatcgacggatgaggagggaagctttggtgttccgaatctgggaactattggcgagcatgggttaaagttggaagaattgaatgcagacttgttcgatgtaccagtaatccacgcaaatggtgcgtttggtgcgatgaatgagtatggggccaacgacgagtatgaaatgctaatgcttatgggaaataacaaagaagatgagaatgaagccatagagaatgagttagagcacgcgatcgatcagttgatagctgagtgtgctcaagattttggtctgatcggggaaaaaggaggaggaaatgggaacgatgggggtgattcctcatcggactcatttgagtcattgacgctagagcctaagagtccgagtgtgatcaacatctcatcggacagttcgcaacccattgtgatgatgctgaatcccagcaagccggaatcatgttgggagattgagatgtttaagggagatgagccaagtgaagaagaaggaagaggaaggtgggatccgatgctgcttgaacaggaactaaaccacgagtatttaatgaatcgtttaaaacttgatgaagaaaggtcgaaagaaaagatggcccaaaggatcgttggagtaaatctgcatccacttcggatcggatatgggattaattccaaggttaagcccagaatacgggcaacggcgaggaagtcagttagaaggaagttacccactccggctaagcgtccgtgggagatatgtggctatatagatcatccgactgagcagtgcttgcatccaccacaggctatgccttatatggttgattgcgccaagtgttactcttgtggaggagtgggacatgtgtccatgtattgcccgtaccttgcgccgaatgcgggcgaaggatcctcgagggatgccctcgtttttatgggtaagggagaaacaagccatgaacgtagacatgaaggagattcaaaaacctttgtaaaaatgtcagaagaattcgtgggggaccgaatgagaaaaagttgccttaatgcatggccaattgaccgcatgtgcccagaaagtaccaaaccggcaaaaggcaaagatgggcaagaatgggcacgaatgggcaaagatgggaaaagttgggcatgccgcgggagaaatttcccctgcagggtgcagaaccgacatgtgtggacacctcacttgcggtgccttgcggctcaagtcaccaatcttggagccaaagtcggcttagttttggagccgaagttggctgagtcttggagccgaagctga

SEQ ID NO: 2833 - DNA, 5736 bp, Arabidopsis thaliana
  Clone ID: AT_F1M23.C1.o14.tg
atgtctgcgggaggcgattctagggttttgatgcatggtcaagacgccactatggtggatgtcggagggaaagataggccaccggaggacccccctgataaaccggagtcgtgggctcggaaagtcattgggactggtttgggagggatgccgattccagaggagattttagatgatgagtttgttaaatcgagagtgacactgaagttcccgaatggtgttgatggggagccggtaatcactatagggcaggaggtcattgatgctatgaatggtttgtggaagcagtgcatgtttgtgaaagtgctaggccggaaagtctcgcttgcggccgtaagtcataggttgagggagatgtggaagccgagtggagcgatgtatgttttggatctccctcgacacttctttatggtccggtttgagaaggaggaggagttcctaacagcccttacggggggaccatggagagcgttcggaagctgtcttttagtgaaggcttggtcaccggagtttaatccacttaaggatgagattgtgactactccaatttgggtacggattgcggatatgccggtgagtttttatcacaagtcaattctgatgagtgttgcgcaagggctggggagacctctgaaggttgatcttacaatgttacactttgagagagggaggtttgctcgagtttgtgttgaggtggatttaaaaaggcctttacaaggtgctctgctggtgaatggggataggtactatgttgcctatgaaggcttgacgaacatttgttctaaatgtggcatctatggccatttggtgcacaactgtccgaaggagctttctgaacaagcggctgctgtggtcaatcagttgcgagtttcggaggtggatgtggcgaatacggtcccacaaggagatggcttcattatggtcaataaggcagggaggagagaagagagtgggctgaggaatagtggagtcccggcgggcggcgatcgtggtgtgggagggaatcaacgacgggaattgtaccggagaaagggtgctgagaatattgcgttatcgaacagttgtggaaggttagcggatgatctggctacaaaggaggttaggaaagttgccaatcaatcagagtcgaataaggaaaatgagaatattcagccccgagccccgcgagaacaaagtgtcgaacaagggaaggcagtcgtttttggcgcgttgttggagaatcgaattagtgggccgtatggagggagtaaagagaagaggccagtgaataagaaagctggagaggctaatgggtcgaagcccaatcatgtaagaaataacaggcccacccggagtttagtgttcggtccgactaaaggtgactatgaaaagttgacgaatgggaaacagatacgggttgagaaagagagttttgggcgagttacaaacgggaccagaacggtggttgatggaggtgctgctacagcaatggaggtcggtgttacggcgctcaacgagcaggagtgtatgggtcagggaatagtccgatcgggatctggggttgtcgcccaagagagatcgccgacggtagcagagagtgatttagttgggcagaaatcacgttcgccgggacctggggttgtcacccatgagaggccgccgacgagtcctaacagagtcataatggggatgaatttggtcctgtcgggggctggggttatcacccatgagaggccaccggcagagatggatagtcatgcgttggagctgagatcgattacgttgggatctgtgtatattactgatgttttagctatctttgaaactcatgctggaggggatcaagctagtcggatctgtcaaggtttgggctttgagaactcctttcgagtcgatgcggttggtcatagtggcgggttatggttattatggagaacgggaataggggaagtttcagtagtagactcaactgaccagttcattcatgcgaaagatgttaatgggaaggataatgtcaatctcgttgttgtttacgctgctccgaccgccagtagaagaagtggactttgggacaggttaggagatgtcatccgtagtatggatggacctgtggtgattgggggggacttcaacacaatagtgcggttggatgaacggtctggaggaaatggtcgtttgtcaagtgactctctggcatttggcgaatggattaatgatcactctctgattgatttgggttttaaagggaacaagtttacttggaaaagaggtagagaagaacgtttctttgtggcaaaacgattggatagggtcctgtgctgtgctcacgctcgtttgaagtggcaggaagcgagtgtgttgcatttgcctttccttgcatcagaccatgcccctctctacgtgcagttgactccggaggtaagcggtaataggggaaggaggccgtttcgctttgaagcagcctggctttcgcatccgggctttaaggagctactgcttacatcgtggaataaggatatctctactcctgaggcgcttaaagtgcaggagctgcttgatctccaccaatccgatgatcttttaaaaaaagaagaggagttgttaaaggattttgacgttgttctggagcaggaggaggtagtttggatgcagaaatcaagagagaagtggtttgttcatggggatcgaaatacgaagttcttccacacatctacaatcatcaggagacgcaggaatcaaatcgaaatgttacaggataatgatggtcgttggttatccaatgcgcaagagctggaaacgcatgccattgattattataaacgtctctattcattggatgacctggacgctgtggtggaacaactacctcaggagggttttacagctctctcagaggctgatttcagttctctgacaaaacctttctcgcctttagaagtggaaggtgcgattcggagtatgggcaagtacaaggctccagggccagatggtttccaacctgttttttatcagcagggatgggaggttgtgggtgaatctgtgactaagtttgttatggattttttcagttctgggagcttcccacaggagacaaatgatgtgttagtggtgttgatagcgaaagtgttgaagccggagaagataacacagtttcgccccattagcctatgtaatgtcttatttaagacgattactaaggtcatggtggggagactgaaaggtgtcataaataagttgattggtcctgcacaaacaagcttcatcccgggaagattgagtacggataacattgtggtggtacaggaggtggtccattcaatgcggcggaaaaaaggggttaagggctggatgttgctgaagttagatctggaaaaagcttatgacaggattcgatgggatcttctggaagatactttaaaagctgcaggcctgccaggaacttgggttcaatggatcatgaaatgtgtggaaggtccctctatgagattgctatggaatggtgagaagacggatgcctttaaaccgttgcgtgggctgcgacagggagacccactgtcgccgtatctttttgtgctgtgtatagaacggttgtgtcatctgattgaaagttctattgcagcaaaaaaatggaaaccgataaagatatctcagtccggtccaagattatcacatatatgttttgctgatgacctaatcctttttgctgaagcttctattgaccaaatccgggtgcttagaggagttttggagaaattctgcggcgcttcgggtcaaaaagtcagtttagagaagtcaaaaatttacttctctaaaaatgttttgcgggatttggggaagcggatcagcgaggagagcggtatgaaagcaacgaaggacttgggcaagtatttaggggtgccaattctgcagaaacgaattaacaaagagacatttggggaagttattaaaagattttcgtcgagattagcaggctggaaaggtcgtatgttgagcttcgcagggcggctcacactcaccaaggcagttttgacgtcaatcctagtgcacaccatgagtactattaaactgccacagtcgacgttagatggtttggacaaggtgtctcgagcctttctttggggaagtactctggaaaagaagaaacaacatttagttgcctggactcgtgtgtgcttaccaaggagggagggtggtttaggcattcgttcagccacagcgatgaataaggcgttgatagctaaagtaggttggagagttttaaatgatggttcaagtctttgggcacaagtcgtgaggagtaagtacaaagtaggagatgttcatgatcgaaattggactgtagcaaagagtaactggtcctcaacctggagaagtgtaggagtgggtttacgggacgttatttggcgggaacagcactgggtaattggagatgggagacaaatcaggttctggacggataggtggttgtctgaaacgcctattgctgatgactctattgtacctctttccctggctcagatgttgtgtacggcccgagacttatggagagatgggacaggctgggacatgtcacaaatagcaccttttgtgactgataataagcgtcttgatctattggctgtgatagtagatagtgtcacaggtgcacatgatcgtttagcttggggaatgacttcagatgggcgtttcacagtcaaatcagcatttgcaatgttgactaatgatgattctccgaggcaggatatgagtagtttgtatgggcgtgtgtggaaagtccaggcaccggaacgggtacgggtttttctttggttggtagtgaaccaagcaattatgacgaactccgagcgtaagagaaggcatttgtgtgattctgatgtttgtcaagtttgtcgaggaggcatagaatcaatcctacatgttcttagggactgtcccgctatgtcgggcatatgggatcgtattgtaccaaggagattgcagcagtcgttcttcactatgtccttattggagtggctctactcgaatctaaggcaaggtcttatgacagagggtagtgactggtcgacgatgtttgctatggcggtttggtggggatggaaatggcggtgtagcaatatttttggggagaataaaacatgccgtgatcgggtgcgcttcataaaagacctagctgtggaggtgtcgatagcttactcgcgggaagtcgagctcaggctgtcggggttaagagtgaacaaaccgatacgttggacacctcctatggagggatggtacaagatcaatacagatggagcttcacgtgggaacccgggtttagcttcagccggaggagtgttgaggaacagtgcgggtgcatggtgtggaggctttgcggttaacattgggcggtgttcagcaccgctagcagaactgtggggtgtgtattatgggttgtatatggcttgggctaaacaacttacacacttggagctcgaagtggattcggaggtggtggtaggtttcctcaagacagggataggtgagactcatcccttgtctttcctggtacgtttgtgccacaactttttatcaaaggactggacagtccgtatatctcacgtatatcgggaagctaatagtcttgcagacggtttagctaaccatgcgttttctttgtcgttgggtcttcatgtttttgatgagatcccgatttctcttgttatgcttttgagcgaggataatgacgggcctgcgcgcctaagacgagtttgtttgtaa

SEQ ID NO: 2834 - DNA, 4248 bp, Arabidopsis thaliana
  Clone ID: AT_F25O24.C1.o20.tg
atggctgacaactctgattcatcttccgctctctgtttttctcattatgttactctgaaactctcaactgcaaactacctcttgtggaagatccagttcgagacttggctcaacaatcaacgtttgcttggttttgttactggtgctaatccgtgtcctaatgctacgagatctatcagaaatggagatcaagttacagaagctacaaatcctgactttctcacatgggttcaaaatgaccagaaaatcatggggtggctccttggttcgttgtctgaagatgctctgcgttcagtctacgggttacacacatccagagaggtatggttttctcttgctaagaagtacaaccgtgtctctgcctctaggaaaagtgacttgcaacgtcgtttgaaccctgtctctaagaatgagaaatctatgcttgagtatctaaactgtgttaagcaaatctgtgaccagctagactctattggttgtcctgttccagaaaacgaaaagatttttggggtcttgaatggtttaggtcaggaatatatgcttgtgtctacaatgattaaaggttctatggatacctatcccatgtcctttgaggatgttgttttcaagctgattaattttgatgataagctgcaaaatggtcaatctggtggaaatcgaggtcgcaacaactacaccactaaagggagaggtttccctcaacaaatctcaagtggctctccctctgactcaggaacaagacctacctgtcagatctgcaacaagtatggtcattctgcttataagtgttggaagcgttttgatcatgcttttcagagtgaagacttcagtaaagcctttgctgcaatgcgtgtctctgatcagaaatccaatccttgggtgactgactcaggcgctacttcacacatcacgaactctacttctcagcttcagtctgctcaaccttacagtggagaagattcagttattgttggcaacagtgactttctccccataactcacattggttcagcagttctgacaagcaaccaaggtaatctgccactaagagatgttcttgtttgtcctaatatcactaagtctcttttatctgtgtctaagcttacctcagattatccttgtgtgattgagtttgactctgatggtgtgattgttaaggacaagctgacaaaacagctcctcacgaaaggaacccgccataatgatttgtacctgttggagaatccgaagttcatggcttgctactcttccagacaacaagctacaagtgatgaggtgtggcatatgaggctaggtcaccctaatcaagatgttctccaacaacttttaagaaataaagccatagttataagtaaaacaagtcacagtttgtgtgatgcttgccaaatgggaaagatttgcaagcttccttttgcttcttcagattttgtttcaagcagactcctagaacgtgtccactgtgacttatggggtcctgcaccagttgtttcttctcaaggttttcgatattatgtaatctttattgacaattactcaagattcacttggttttatccattgcgcctcaaatcagatttcttctctgtctttctcacgtttcaaaagatggttgagaatcagtgtcaacaaaagattgctagttttcagtgtgatggagggggtgagtttatcagcaatcagtttgtttctcatcttgcagagtgtggaatcagacagttgatctcatgtccctacactcctcaacaaaatggtattgctgaaagaaaacatcgtcacattacagaacttggttcgtcaatgatgtttcaaggcaaagttcctcagtttttgtgggtagaagctttttacacttcaaatttcctgtgcaaccttcttccatcctcagttctcaaagatcagaaaagtccatatgaagttcttatgggaaaggctccagtctacacttctcttcgagtttttggatgtgcctgctatcctaatctcagaccttatgcaagtaacaagtttgatcctaaatcgttactatgtgttttcacaggttataatgagaagtacaagggatacaagtgttttcatccgcctacagggaagatatatatcaacagacatgttctatttgatgaatccaaattccttttttcagatatctatagtgacaaagtttcaggtacaaactcaactttagtctcagcttggcaaagcaactttctcccgaagagtattcctgcaactccagaagtcttggatatctctaatactgcagcttctttcagtgatgaacaaggtgaattctctggtgctgttggaggaggaggttgtgggtgtacggcggacttagattctgttcctataggcaacagtctcccttcttctccagttactcagcagaattcaccacaaccagaaactcctatctcttctgcaggttcaggaaatgatgcagaagactcagagttgagtgaaaattcagaaaattcagaaagttcagtgttcagtgaagctacaacagaaacagaagctgctgacaacactaatgatcaaagtcatcctatgataacaaggtctaaatcaggcattttcaagccaaatcccaaatatgctatgtttacagtaaagagtaactaccctgtaccaaagacagtcaaaacagctcttaaagaccctggatggactgatgcaatgggtgaagagtatgactcttttgaagaaacacatacttgggatttggttccacctgactcgttcattactcctttaggctgcaggtgggttttcaaaacgaagctaaaggctgatggaactcttgatagattaaaggctcgtcttgttgctaagggctatgaacaagaagaaggagttgattacatggagacttatagtccagtggttcgcacagccacagtgagaacaatcttacatgttgcaaccattaacaagtgggaaatcaagcaacttgatgttaaaaatgcctttttacatggtgatttgaaagagactgtgtacatgtaccaacctccaggttttgaaaatcaagacagacctgattatgtgtgcaagctcaacaaagccatttatggtcttaaacaagctccgagagcttggtttgacaagttcagtacttttctcttggagtttggtttcatctgtacctattcagatccttctctgtttgtgtttctgaaaggaagagatctcatgttcctcttgctctatatggacgacatgcttctcacaggcaacaataagaaatatgctatggatctccttgttgcagcaggaatggcagattgtgccccaatgccaacccctttgcctcttcaattggataaagttcctggtcaacaagaaagctttgctgatcctacttattttcggagcttggctgtcaatcttgtgtgtcaaaagatgcattcccccacagttgctgatttcaatctcctcaaaagagtcttacgctatctcaaaggaaaagttcaaatgggtctcaacttacacaacaacacggatatcactttgcgtgcttatagtgatagtgactgggcaaactgcaaagagactagaagatctgttggtggtttctgcacttttcttggcactaacataatcagttggtctgcaaaacgtcatccaacagtctcaaggtcctcaacagaagctgagtataggaccctctctatcgcagctacagaagtgaagtggatctcatctttgcttcgtgaaataggcatctatcaacctgcaccaccggagttgtactgtgacaacctctctgctgtctacctcactgcaaatccagcaatgcacaaccggtctaaggcctttgatgttgattttcactatgttcgagaacgtgttgccttgggagctttggttgtcaaacatgtccctgcttctcatcaacttgcagacatcttcaccaagtctcttccccaacgtccattctttgacttaaggtacaaacttggcgttgttttacctcccacaccaagtttgagggggtgtgtgaatcagagagaacctcctctacaatcagaagctttgctttctgcgaatggacctgcaacactcaacaatactttgggcctcagtcaaagtgtcaagcccatcaacctcaagtcttctctaccttgcaacggtaacaagattcctcaatttccagcgcatcaacgtacgggattcacagctaatcatttgtcccttcataacaaatttgatcctctttgttcctctgtcgtgatgtgcagctaa

SEQ ID NO: 2835 - DNA, 2154 bp, Arabidopsis thaliana
  Clone ID: AT_T18B16.C1.o100.tg
atgatggaggtaagtttgacggcgggagcaatcgggaagataatgaatggagaagtgacgactgaagcagatatgattccggtgttgcaagtgacggatttgaagcagattatggctcaacaagatccaacaagagagaggtttaggatggtgttatctgatgggacatacttgcatcaaggaatgctaggaactgatctcaacaatcttgtcaaagaagggactcttcaacccggttctattgttagacttactcgtttcgtcggtgatgtcatcaagggtcgaaggattgttattgttccgcaactggaggtgttaaaacagatttctgatattatcgggcatcctgttccaggaggaaagcataatgatcaacgtggagcagattctggtattaagtttaatacaactgagcaacaaggtagtggtatccgtcaagtaaacaatatcgagccagggagaagtaatgcagctatttcacctcaggttggtgcacctcctaagataattccagttaatgctcttagtccatattcaggtaggtggaccatcaaggccagagtcacgaataaagcagcacttaagcaatacagtaatccccgtggggaagggaaagtgttcaactttgatcttcttgatgctgatggcggagaaatacgtgttacttgttttaacgctgtggctgatcaattctatgaccagattgttgttggtaatctttatcttatctcgaggggaagtttgcggcctgcacaaaagaactttaatcatcttcgaaatgattacgagatcatgctggataatgcatcaactataaaacaatgctatgaagaggatgctgcaattccgcgccatcagttccatttccgtaccattggggatattgagagcatggagaataactgcatcgttgatgtaattggtattgtgtcatctatcagtcctactgtaacaataacgaggaaaaacggaactgcaacaccgaaaagatcacttcagttgaaggatatgtcaggccgaagtgttgaggtaactatgtggggtgacttccaaagtctttgtgattctggtgtgtttccggttcttgctgttaaggcgggcaggattagtgaatttaatggaaagacagtgagcaccattggatcaagtcagctgttcattgacccagattttgttgaagctgagaaactgaagaactggtttgagagagaaggaaagagtgtcccttgtatctccttatctcgggagttttccggcagtggcaaagtagatgttcgtaagacaatatctcaaattaaagatgagaaactaggaacctccgaaaaaccagactggatcacagtcagtgccacaattttatacttgaagtttgataacttctgctacacagcttgtcctatcatgaacggtgatcgtccatgcagcaaaaaggtaacagacaatggagatgggacatggcggtgcgaaaagtgtgataaaagcgttgatgaatgtgactacaggtatatactgcagcttcagatacaggaccatacagatcttacttgcgtcacagcattccaggaggctggtgaagagataatgggcatatctgctaaagatttgtattatgtgaagaatgaacacaaggatgaggaaaaattcgaagatatcatccgtaaggttgcttttaccaagtacaacttcaagctgaaggtaaaagaagaaacattcagcgacgaacagcgtgtgaaagcaacagttgtgaaagtggacaagctaaactattcagcagataccaggactatgttaggtgctatggataaactcaggaccagagatgcaaattctcttcccattaacccagaaggatccgattacaatgctgatgtggttaatactggtataggaagctcaggaaccagagatccctcatcggtccaaagaagggatttcggtttacatgcgcatcaatcgggtcaatctgggaatcactatagtggtggtggtgctactactagctgcaatgtctgtggaaacagtggtcatgtttctgcaaagtgtccaggcgctactaagccgcaagagcaagggcagtacatgggtggctcttacagaggcacgacggggagttatggaggaggactaccgagacaacatgttggaagctactga

SEQ ID NO: 2836 - DNA, 1059 bp, Arabidopsis thaliana
  Clone ID: AT_T13H18.C1.o12.tg
atgagcgacgttgtggtggtaacggagaaacaagcaagtggaggcggaggagcaccatcgtccattcaatgtcccatgttgaactcgagtaactataccgtgtgggccatgaggatgagaagctttgaagacatagttggacgtcgtaaagtgtatgaagaacgtatttttgatgaagaggatgttcaagataagcaaagcaaacttatgtatgcaaacacggagaatcaaacgagccaatacaatcgagagtatcatggagattctaaaggtagaggtcgaggaggatgctcttactacaagggaagaggccgcggaaggtttaatgggggaagagatacatcaaaaatcatgtattataggtgtgacaagttaggtcactacgcctctgattgcccggatcgacttctcaagctgcaagaaacccaagagaacgagaaagatgatacacaaactgcggatgaacttatggttcacgaagtagtgtatctaaatgagaagaattgcattccgagcaactatgaaactaacaccggagaagatgtgtttggtgatcaaagatacttcactagtacagatgattctgtcaccgggaaagtgcgatttggcgatgattcacggattgatatcaaaaggaaaggatcgatcttattctttgacaagaatggcgaacatagaaagatgttggatgtctatttcattccgaatttaaaaagcaacatcattaggttgggacaagctacagaaccgggctgtgatataaggatgaaagatgacattctaacaatgcatgaccaagagggaaaattacttgtccatgcaacaagatcaaagaatcgactctataacgttcggatggcaaggaatgggacaacaatggagatgaggagacattttggagcaaaatctacggaaaaggatgctaaggacgatttcagtcccagattcagcgagagtgtcgtcgatcgacaccagtttcggcccagcaaagtccattacgctttcaagtttacagaagaggaaatttgcccaagaagacttccctatttgtattattag

SEQ ID NO: 2837 - DNA, 1629 bp, Arabidopsis thaliana
  Clone ID: AT_F17M5.C1.o130.tg
atggaagtagatgatggttacgtggagtatgttccagtagaggagcgtctagcgcagatgaagcgaaaggtggtggaagaacctggcaaggggatgatggagcatttatctgacaagaagaagcttatgtctgttggtgaattagccagaggtatcacttatacagagcctctctcaacatggtggaaaccccctctgcacgttaggaagatgtcaaccaaacagatggatttgattaggaagcaatggcatattacagttaacggtgaagatattcctcctccaatcaaaaacttcatggatatgaaatttccgagtccacttctccgtatgctcaaggataaaggaataatgcaccctactcctatccaagttcagggtcttcctgttgttttgtctggcagagatatgattgggattgcgttcactggttccggaaagacgttggttttcgtgcttcctatgatcatattagctctgcaggaggagataatgatgcctatagctgctggagaaggtcccattgcgcttgttatttgtccgtctagagagcttgctaagcagacttacgatgtggttgaacagtttgtggcatctttagtcgaggatggatacccgcggttgaggtcgttgctatgcattggaggagtggatatgagatcacagttggacgttgttaagaaaggtgttcacatcgttgttgctactcctggaaggttgaaggatatcctcgccaagaaaaagatgagcttagatgcttgcaggttgttgacactggatgaagcagataggttggttgatttgggtttcgaagatgacataagacatgtctttgaccactttaagtctcagcgtcaaacacttttgttttctgccacaatgcctgcaaaaatccaaatctttgccacaagtgctctggtgaaacctgtaactgttaatgtaggaagagctggagctgcgaatctcgatgtcatacaggaggttgaatacgtcaagcaagaagcaaagattgtttaccttctggagtgtctgcagaaaaccactccaccggttttaatattctgtgagaacaaagctgatgttgatgatattcacgagtacttgttactgaaaggagtggaagcagtggctatccatggaggaaaagatcaagaagacagagattacgcaatatctttgttcaaagctgggaaaaaagacgttttggtcgcgaccgatgttgcttcaaagggtttagatttccctgatatacaacatgtaatcaactacgacatgcctggggagattgagaactacgtgcataggataggaagaacaggtcgctgtgggaaaactgggatagcaactacgtttataaacaagaaccaaagcgaaatcacgctgctcgatttgaaacacttgttgcaagaagctaaacagaggattccacctgtccttgctgagcttaatggtccaatggaagaaacagaaaccattgctaatgcaagcggtgtcaagggttgtgcttattgtggtggtctcgggcatcggattctacagtgtccaaaatttgaacatcagaagagtgtagctatatctagttctaggaaagaccattttggctctgatggatacagaggagaggtgtaa

SEQ ID NO: 2838 - DNA, 4248 bp, Arabidopsis thaliana
  Clone ID: AT_F28K20.C1.o17.tg
atggcgacctcatacccttttccagataatgttcatgttacaagttctgttactctcaaactcacagacagtaactacctcttgtggaaaactcaattcgagtctctcctatcgagtcaaaaactcataggttttgttaatggcgccgtcaatgcaccatctcagtctcgccttgtcgtcaatggcgaagtcacctccgaggaacccaatcctctgtatgaatcttggttctgtaccgatcagttagttcggtcatggctctttggcacgttgtctgaagaagtccttggtcatgttcacaatctaagcacctctcgtcaaatttgggtgtctctagctgaaaacttcaacaaaagcagtgttgctcgtgagttctcacttcgtcagaatctccagcttctctccaaaaaggaaaagcctttctctgtctactgccgagagttcaagaccatctgcgacgctctcagctccattggcaagccagtcgatgaatcaatgaaaatttttggttttcttaacggtcttggtcgtgactatgaccccatcaccacggtgattcaaagctctctcagcaagcttccgactccaactttcaatgatgttgtctcagaagttcaaggctttgacagtaagctacaatcatatgaagaagcggcatctgttactcctcaccttgccttcaacattgaaagatctgagtctggatctcctcaatacaaccccaatcaaaaaggaagaggacgttctggtcaaaataaaggcagaggaggctactcaactcgtggacgagggttttcccaacatcaatcctccccacaagtttcaggtccaagaccggtgtgtcagatatgtggtcgcactggtcacactgctctcaagtgttacaatcggtttgataacaattaccaggctgaaatacaagctttttctactctccgggtctcagatgatacaggcaaggaatggcatcccgactcagctgcgacggctcacgtaacatcatcgaccaatggacttcagtctgcaacagagtacgaaggggatgatgctgtcttggttggcgatggcacttatctcccgattactcacactggatctaccactatcaaatcctcaaatggtaagattcctttaaatgaagtcttggttgttccaaatatacaaaaatctcttctctctgtgtcaaagttgtgtgatgactatccttgcggtgtttactttgatgctaataaggtttgcataatcgatttacaaacacagaaagtggtaaccacgggtcctcgtagaaatgggctctatgtgttggagaatcaagagtttgtggctctttattcaaaccgtcagtgtgcagcaacagaggaagtatggcatcaccgacttggacacgcaaattctaaggctctccagcaccttcaaaacagcaaggcgattcagataaataagagcagaacatctccagtttgtgaaccttgccagatggggaaaagttcaagactaccatttttaatttcagattctcgtgttttacatcctctagatcggattcattgtgatttatggggtccttctccagttgtatccaaccaaggcctcaaatattatgctatttttgttgatgattattcaagatactcttggttctatcctttgcacaacaagtcagaatttctctcagtttttatttcgtttcagaagttggtagagaaccagctaaacactaagatcaaagtatttcagagtgatggaggaggagagtttgtgagcaacaagttaaaaacacatctcagtgagcatggcatccatcatcgaatctcatgcccctataccccacagcaaaacggattggccgaacgaaaacatagacatcttgtggagcttggattgtctatgctctttcatagtcatacacctcagaagttttgggtagaatccttcttcactgccaattacatcattaatcgcttaccatcctctgtcttgaagaatttgagtccatatgaagcgttatttggggaaaagccagactattcatctctccgtgtgtttggttcagcatgttatccttgtctcagacctctcgctcaaaacaaattcgatccgcgctccttgcaatgtgtgttccttggatataacagccaatataagggatatcgctgtttttaccctccaacaggcaaggtctatatctcaagaaatgttatcttcaatgagtctgaactaccattcaaggaaaagtatcaatctctagtccctcagtactcaacacctcttcttcaagcttggcaacataacaagatcagtgagatttcagtacctgcagctccagtccaattgttttctaaaccgattgatcttaatacatatgcaggatctcaagttacagaacaactgacagatcctgaacctacctctaataatgaaggaagtgatgaagaagtgaatccagtagcagaagagattgctgcaaatcaagaacaagtaatcaattctcatgcaatgaccacaagatcaaaggcaggaattcaaaagccaaacacgaggtatgctctcatcacctctcgaatgaatactgctgaaccaaaaacccttgcatccgctatgaagcatcctggttggaatgaagcagtacatgaggagattaaccgggtccatatgttgcatacatggtcgttggttcctccaactgatgatatgaatattctaagctccaagtgggtttttaaaaccaaacttcacccggatggctcaatcgataaactgaaagctcgtctagtggctaagggcttcgatcaagaggaaggggtggactatctagaaacgttcagtcctgtggttcggacagcaacaattcgtcttgttcttgatgtctcaacatcaaaaggttggcctattaagcagcttgatgtctccaatgccttcttacacggtgagctgcaagaaccggtcttcatgtaccaaccctcaggttttattgatcctcagaaacccactcatgtctgtcgtctcacgaaagccatctacggtttgaaacaagcgccacgggcatggtttgatactttcagcaactttcttcttgattatggatttgtctgcagtaaatcggacccctcattatttgtgtgtcatcaagatggaaaaatactctatttactgttatatgttgacgacattttgttgactggcagtgatcaatctctcttagaagatcttctacaagctctcaagaatcggttttctatgaaggatcttggtccacctcgctatttcttgggtattcaaattgaagattatgctaatggtctctttctacatcagacggcttatgcgacagacattttacaacaggcaggaatgagtgattgcaaccccatgccaactcctctaccacaacaattggacaacctcaattctgagctatttgcagaaccaacctattttcgaagccttgcgggaaaactgcagtatcttaccatcacacgtccagacattcagtttgctgtcaattttatttgtcagagaatgcactcccctacaacctctgacttcggactgctcaaacggatactacggtacatcaaagggacaattggaatgggtttgccaataaaaaggaactctactcttactctttctgcctacagtgatagcgatcatgcgggctgcaagaatactagaaggtctactactggattctgcatcttgttaggctccaacttgatctcttggtcggcaaaacgacaacctacagtgtctaattcctctaccgaagcagaatacagagctctaacctatgcagcacgagaaattacttggatctctttcttactgcgagatctcggcattccccaatatcttcctacacaagtttactgtgataacctctccgcagtgtacctatctgcaaatccggctctccacaatcgttcaaaacattttgataccgattatcactacatcagggagcaggtcgcactcggtctgatcgaaacacaacacatttcagctacctttcaattagctgacgtgtttacaaagtcacttccacgccgagcatttgttgatctcaggagcaaacttggtgtgtctggttcacccactccaagtttgagggggagtgtgagcaacaaacaagtaaccggcccaacaacaacaaaaggcccatctcagcccagtcaaatagaagaagacaaaatagactccagctcaaaacagagcaacgatcgtacagaggaggggcgttttgcctga

SEQ ID NO: 2839 - DNA, 3450 bp, Arabidopsis thaliana
  Clone ID: AT_T26I20.C1.o9.tg
atggatcaatccatggatctctatactcttccatctttgaacatctcaaactgtgttacggtgaaactcacagaccgtaactacattttgtggaaatctcaatttgaatcatttctctctgggcaaggccttcttggtttcgttaatggcgcctatgctgctccaacaggcacagtttctggtccacaagacgccggcgtcactgaagctatcccaaatccggattatcaagcttggtttcgctccgatcaagttgttatgtctgaggatattctcagtgttgttgttggttccaaaacatctcatgaggtatggatgaatctcgcaaaacacttcaatcgcatttcttcctctcggatctttgagcttcaacgccgccttcatagtttatcaaaagaagggaagaccatggaggagtatctgcggtatctcaagactatatgtgaccaactcgcctctgtgggaagtccagttgctgaaaagatgaagatttttgccatggttcatggtcttactcgagagtatgaaccgttaatcacttctcttgagggaaccttagatgcgtttcctggtccatcttatgaagatgttgtttatcgtctcaagaactttgacgatcgtctccaaggctacactgtcactgacgtttctccccatctggctttcaacactttccgatcttcaaacagaggccgtggaggaagaaacaacagaggcaaaggaaacttctcaactcgaggtcgtggatttcaacaacagttctcctcctcaagttcttctgtctctgcgagtgagaaaccaatgtgtcagatttgtggaaaaagaggtcactatgctcttcagtgctggcatcgatttgatgactcttaccaacactctgaagctgcagctgctgccttctcagctcttcacataaccgacgttagtgacgacagtggttgggttcctgattctgctgcaacagctcacattaccaacaacagctctcgtctgcaacaaatgcaaccttatcttggcaatgacacagtaatggctagtgatggtaattttctgcctatcactcacattggctcagctaatctcccttctacatcaggtaatctcccattaaaagatgtattggtatgccctaatattgctaagtccctattatcagtgtcaaaactgactaaagactatccctgctcctttacctttgatgctgatggtgttcttgttaaggacaaggcaacttgcaaagttctgacaaagggaagcagcacaagtgagggactttataagttggagaacccaaaatttcagatgttctattccacccgacaagttaaggcaactgatgaagtttggcatatgcgattaggtcatccgaatcctcaagttcttcaactcttagctaacaagaaggcgatccaaataaataaaagtaccagcaagatgtgtgaatcatgtaggcttgggaagagttcgagattgccatttattgcttcagattttattgcttcaagacctctagagagagttcattgtgatctctggggtccagctcctgtttcatctattcaaggttttcagtactatgtaatcttcattgataatcgatccagattctgttggttctatccattaaagcacaaatcagatttttgttcactcttcatgaagtttcagagttttgttgaaaatctcttgcaaacaaaaattggaacttttcagagtgatggaggaggagaattcacaagtaataggttcttacaacatcttcaagaatctggtatacaacattatatctcttgccctcacacaccacaacagaatggtttggcagaaagaaagcatcgacaacttacagaaaggggtcttacattaatgtttcaaagcaaagcaccacagagattttgggttgaagcattctttactgccaacttcctcagcaatcttcttccaacatcagctcttgacagctctactacaccttatcaggttctatttggaaaagcacctgactactctgccttgagaacattcggatgtgcctgcttccccacactccgtgcatatgctcgtaataagttcgatccgaggtctctcaagtgcatttttcttggttatacagaaaaatacaagggttatcgctgcttctttcctcccactaaccgagtatatctcagtcgccatgtcttatttgatgagagctcctttcctttcattgatacttacaccagtttgcagcatccttctccaactcctatgtttgatgcttggttaaaaagttttccaagctcttcatctccgctggaaaatgaccaaactgcaggcttcaactcgggtgcaagtgttcctgtgatcacagcacaacaaacacaaccgattctgtcattaaaagatggccctaacattctccttccagagggggagataacagttagtagcaacaatcaagacatagaagatgaaccaatctgtgtcacaccgctccaaacgctttcttcagaagataatgctaaaagttctgagacactgtctatgggaagtgaggagtgttctgagtgtacggcaagcttcgatcttgatcctattgggaacaacgctctctcttcatcccctaggcatgatcaattaacttccagcattcctcgtgcggctacagaatctactcaccctatgactacaaggctaaagaaaggaattatcaaactaaatcaacgggtcaaacttaatgttgatggctcattagacaagtacaaagctcgactagttgctcaaggcttcaaacaagaagaaggcattgactatcttgagacatacagtcctgttgtgcgatctgcaaccgttagagctgtgcttcacctttctaccatcatgaactgggaactcaaacaaatggatgtcaaaaacggttttctccatggagatcttactgaaacggtttacatgaaacaaccagctggattcattgacaaagctcatcctgatcatgtgtgcttattacataaagctctttatgggctcaaacaagctccaagggcctggtttgacaagttcagcaaatttttgctcagctttggttttgtttgcagtatgtctgacccttctctctttgtttgtgtaaagaacaaagatgtgatcatgcttctcctctatgttgatgatatggttatcacaggaaacagctcaaagcttctctcaagtcttctcagtgagctaaataagcagttcaaaatgaaggatttgggcagactaagctattttctcggtatccaggctcagtttcattctcaaggtctttttctctctcaacaaaaatatgcagaagatcttctagccacagccgcaatgtccaactgttctcctgttgcaacaccgttaccacttcaacctgagagaacccctaatcaaaccgagctcttcgacaatccatcttacttcagaagcctggctggtaagctgtag

SEQ ID NO: 2840 - DNA, 2184 bp, Arabidopsis thaliana
  Clone ID: AT_MFD22.C1.o10.tg
atggcggcggcgaaaaaaccgactctacaagacgttgtttccgatgaacttaactatgaactctgggctccaaccttgaaaaatgctctaactgaaaaaggactttgggatgttgttgaaaatctaatgccggcggatctatcgaagagtccagagctagcgacggagattctaccggaagatcttctgaaatggagtgattttatggtaaaagacagaaacgcgcttcagattttgcaatcttgccttccagtttctgttttgagattgacacttgagaccaattcagccaaagatctttgggatttgctggaatcagctaatgaacaagccaagttagacaagaaactcgaacaagataaggtagaagaaggagaacgtatctcctcattgttgacgaagattgctgataacagtttatattccaatcttctggctatctcccaaatggtaatctcgctgtcagattcatatgagcatgaaacgaacgagctcatactcatgggtctgaagaagctttctttttaccgatttcgtgaccttcttgatctactggaatcatgtacagtgaatcaaaccttgtacaatatcatgaaaggaaatgggtatggatcatcatcacacgatttgggtaggatctactggttaaactccatgtcagattcatatgatggtgcagctctggtgatggaagaactgatgtgtgtcaagaatctcacttttaagaatactcgtgagctttttgatatgtttgaattagtatcagtgaagaccatcaatgaaattatgaaggactttgaggttggatcatcattacgttcgaaagaattttgtcattcactcaatgatcttaggggtttgctaaaagaagcaaagttagagaagaaaggagattgttctgcttccatggttttgaaaagggtcatgagttctaggcatgaaagaggagagtgtatccattgtggaggaaaagggcatgtcttcaaagactgtagcaacagaaagaatcaaagcatgaatgttgttttcaagtttggaccatctggcatcaatcttagtttagatgaaacattttttggatcactggcggcgaatcctatgactctacaagacgttgtttccgatgacctaaactatgaaatctgggctcatattatgaaaactagcttagtggagaaaggactttggtacgttgtcaagtacggaatcccgccggatttatcaaagattcgagagttagctacgaagattcaagctcaagacctttcaatatatagagattatgtggcaaaggactctaaagcgctccagattctgcaatcttctcttccagattcggttttcagaaaaacacttgaggtcactacagccaaagatctttgggatttgctaaaagaagctgacgtacaagccaagttagagaagaaattacctgagtaccaaatgttagcaatcgatgttggtcatttgacatttgatgaagatatgtggatggtatacactactaccaccaaccatttgactccgtatgtcaagtatttcactaatttagacagaacatacagagctaagatcagatccatcattggatctattatcatgtctgaagggaggggagatgtcaggatcatgaccagggaagggcagaagacgatcaagaatgtgctttatgtccctgggatcaacagaaacgtgttgagtgttcctcagatgacacggataggatatagagttgtaattgacgctggcaatctcaaatgcacagtaaaggatcggactggaagattatttgctgaatccttgtgggataataagagatgcgattggtcggcgacgacaaaacctaatctacaagacataatttccgatgaccttaacatggaagtctggtcggcgatgttgaaaaccatcctaacggaggaaggactttgggatgtggtcgcgaacggagtcccgccggatccatcgaagattccaaagttagccgcgacgattcaagcagaagagctttgcaaatggagagagcttgcgagagaagacatgaaagcactccaaatattgcagtctagtctcacagattctgtgtttagaaagactctctcggctacttcggctaaagatctttgggatatgctaaacgaagtacctgatcatgtagctgaatgtttagttgatgatagtcca

SEQ ID NO: 2841 - DNA, 4209 bp, Arabidopsis thaliana
  Clone ID: AT_T4E14.C1.o6.tg
atggaactctactctgttccttctctcaatatttcaaattgtgtcaccgtcactcttactgccaagaactatattctctggaaatctcagttcgaatcttttcttgatggtcaagggcttctgggttttgtcacaggctcgattcctgcaccaagccaaaccagcgttgtttcagacattgatgggtcaacatcggcttcacccaatcctgagtactacacctggttcaagacagatcgagttgtcaaatcctggctccttggttctttcttagaagatattctcagtgttgtggtcaactgcaacacttctcatgaggtatggatctctgtagcaaaccactttaatagggtttcctcctctaggttatttgagctgcaaagacgcctccaaaatgttagcaaacgtgataaatctatggatgaatatcttaaggaccttaagactatttgtgaccaactagcctctgtaggaagtcctgtaacagaaaagatgaagatttttgctgctttgaatgggttagggcgagagtatgagcctatcaaaaccactattgaaaactccatggatgctctgcctggtcctagtctagaggatgttattcctaagcttacaggctatgacgatcgacttcagggttatcttgaagagacagcagtttcacctcatgtcgccttcaacatcaccacttcagatgactctaatgcttctggttacttcaatgcttacaatcgtggcaaagggaaatctaacagaggcagaaactcatttagtactcgtggtcgtggtttccatcagcagatatcttcaacaaacagttcttcaggttctcagtctggtggtacttcggttgtctgtcagatttgcgggaaaatgggtcatccagctcttaagtgttggcatcgcttcaacaacagctaccaatacgaagagcttcctcgtgccttagctgcaatgcgcatcactgatattacagatcaacatggcaatgaatggcttccagattctgctgcaactgctcatgtcacaaacagtcctcgatccctgcaacaatctcaaccataccatggatctgatgctgtcatggttgctgatggtaattttctgcccattacacacactggctcaacaaacttggcttcctcatcaggtaatgtccctctcactgatgttcttgtttgcccaagcataacgaaatctctcttgtctgtgtctaagcttactcaagattatccatgtactgttgagtttgactctgatggtgtgcgtatcaatgataaggcaaccaagaagcttctcataatgggaagcacttgtgatggtttatattgtctgaaggatgactctcagttcaaggctttcttctccactcgtcagcagtccgcaagtgatgaagtgtggcacagacgccttggacatcctcatcctcaagtcctgcagcaactggtcaagaccaactctatctctatcaataagacttctaagtcactctgtgaagcatgtcagcttgggaagagcactaggctgccatttgtttcttcttcatttacttcaaatagacctcttgagagggttcactgtgacttgtggggaccctctccaattacttctgtacaaggctttagatattatgcagtctttattgatcattattctcgattcagttggatttatcctttgaagctcaagtcagatttctacaatatctttgttgcatttcacaagctagttgaaaaccaacttaatcataagattagtgtgtttcaatgtgatggtggtggagagtttgtcaatcataagtttctgcaacatcttcagaatcatgggatacaacaacacatctcatatcctcacactcctcaacaaaatggactagcagaaaggaagcacaggcatttggtggaattaggcttatctatgctgtttcagagtaaagtccctcttaagttttgggttgaagccttcttcactgccaactttctgattaatcttctccctacatctgctgttgaggatgctatttcaccttatgaaaagctgcatcagacgactccggactatacagctctcagatctttcggttgtgcttgttttccaactatgcgtgactatgctatgaacaaatttgaccctcgctctcttaagtgcgttttcctggggtacaatgacaaatacaaggggtataggtgtttatatccacctacaggacgggtttatataagcaggcatgtgatttttgatgaaacagcttatcctttctctcatcactataaacaccttcattcgcagcctacaactccattacttgcagcatggttcaaggggtttgaatcctccgtgtctcaggcaccaccaaaagtgtctccagcacaaccaccacagagaaaggcaacactacccacgcctcctctttttactgctgctgattttcctcctttaccacggagaagccctcagttgtctcagaattctgctgctgcacttgtgtctcaaccttcaacaacaacaatcaattcaactcatccacctgctgtggtgaatgagagttctgagcgtacgataaacttcgattctgcttctattggcgacagctctcactcatcccagcttttggtggatgacactgtagaagatctcatggcagctccagttcctactcaacaagctccacctcctactaacactcacccaatgatcacaagagctaaggtgggaatcacaaaaccaaatcctcgttatgtttttctgtctcacaaggttacttatcctgagccaaagacagtaactgcggctttaaagcatccgggttggacaggcgccatgacagaagaaatgggcaactgttctgaaactaatacatggtccctggtgccatacacacctaacatgcatgttcttggaagcaaatgggtcttccggactaaactccacgctgatggaaccttaaataagctcaaggctcggatagttgcaaaatgttttcttcaagaagaagggattggctatcttgagacctacagtcctgtagtaagaacacctacagtccaattggttctccatttggctactgctttgaactgggagttgaagcaaatggatgttaaaaacgccttcttacatggcgatctaaatgagactgtttacatgactcagcctgctggttttgttgataagagtaaaccaactcatgtttgcttgcttcacaaatctatctatggtttaaaacagtccccaagagcttggtttgacaagttcagcacctttctcttggagtttggatttttctgcagtaaatctgacccttcactattcatctatgctcataataataacctcattctgcttcttctttatgttgatgacatggtgattacaggaaatagttcacagacattatccagtcttctagcagctctcaacaaagaattcagaatgactgatatgggacaactccactacttcctgggaattcaggttcagcgaaatcaacacggcctgtttatgtctcagcagaagtatgctgaagatctcttggtggcttctgcaatggagaactgcactcctctgccaactcctctacccgttcagcttgacagagttccacaccaagaagaacctttcactgatccaacttatttcaggagtattgctggaaagctccaatatctcaccttgactcgccctgacatacattttgctgtaaacttcgtgtgccaaaagatgcaccagccaacaatgtcagactttcatcttctgaagcggattctaaggtacataaaaggtaccatcactatgggaatctcttacaatcaaaattctcctactcttttgcaagcttacagtgacagtgactggggcaactgtaagctcacaagacgctctgttggtggcctctgcacctttatggccacgaacctggtgtcatggtcgtcaaagaaacatccaactgtctcccgaagctccacagaagctgaataccgcaccttatctgatgctgcctctgagatcctctggctgagcactcttctccgtgagcttggcattcctctcccagatactcctgaattgttttgtgacaacttgtctgcagtctaccatacagctaatccagcgtttcatgcaatgattgataaagcaacaaaaagtaccaactttcgagtgctatatccaaatggtgacagtattttgacgtggcatgaaaatgcataa

SEQ ID NO: 2842 - DNA, 3783 bp, Arabidopsis thaliana
  Clone ID: AT_T18B16.C1.o160.tg
atggacggcgaaggggaagggagcggaatacggctgagcaagagattcgctggcgggaaggtcaccggcggtagcttagaagtcgattacaagaccaaatccggtaccgcttggagccactctttcctgaatcagaagccatggcatcctctttcttatcccaatcagcgccgcaaatggatcgccgagcagactcatgcccaacacgatcgaagagcggaagaggtggctcgcgaggtaattcatcgcacatcgtctccaatttctcgtgattgttttgcgcaagagcaggaatttttcaagcaagcagctcttatctcgaagaaagaaagagagaagatcgaaacgatgaaagctgtgagctttatgtatgttcgtccacctggctatgatcctgaaagtgccaaagcagcagaatacaaggatgagaaacacaagggtcagggttcttcaactcaggatccagtggcggacgacaatgttggttctagaccagaagaatcacaaggtgggggagaacgcacacaggaaaggaagaaaccacgacccaaagatgtgtttggtcgtgctcttcctactgaagaagaatttgaggttcttaaaaatgcaccaaggatggagactggtattcctgggagagtaaagccatttgcagttgaagtgcgtaatgtgaaatgtctgagatgtggaaactttgggcaccaaagcggtgatcgtgactgcccattaaaggatgcagtaatgccaaatgaagaacttcgattgaaaagagatgacccgttgactgctatcattgcacatacagatcctagtgagcctctgaagtgggaattaaaacaaaagccgggcttgagtcctcctcgtggtggttttgatcctgatgatccaaatcaacaaatcgtcgctgaagatatatttgacgaatatggagggttccttgagggcagcatcccaatagaaatactgaagagtatgtcgtcggataagaaaagaaaatccaaaaagaacaaaaggcacaagaagcattcatctcggactgttgaggaaactgatgaatcttcaacaggctcagaagatagtagagagaagaggggatcaaagaagcgcaagaaacttaagaagaagagcaagaagcagtatgattctgattcactctcctttgaaggttcaggctctgatagttaccgtctaagtaggagaagacacaccaagcatgtagatccatctgcctcattaaaatctgaggtttaccatcaaggaaacagtcacagagaaaagcattactacgacgagaagcaccagaaacggaaggaaatcgtggatagaccgtctgcttcatccgatgattcagattattatagaagtaacagtagtagaaagaaaagatcagaagatgattacaaaagccatcacagggagagaaagcaagtgcatagtaacgatcctgtttcagagaaaagtcagaaacagcattattcggagtctggaaagattcagagagtcgagaaagagcatagatatgatgagagaagacacagatacgtcgatatggagtctgaaaatcgtaatagatccgagaagaaaccgagatatgatgatcgtgattctgagaagcatcacaggagtgtgaagggcaaagaaaagcatgtgtatgaagcatctgatgatcctgaagagttttctgacagatacagaagcacaaagaaaactgaatctgattcggaatcaaaccgtagaagtagaaagaagaagcatgagttgtcttccgaagaagaagaaggggagtctcgagtcattggagagcaagtgagaaaatccatgtccttgattcaccgacggctatatcgtatatctggattatcgtctgttaatgcttggaatttgcagatacgagaagcggttaatagaaatgatccggtggaatcacttcttctgtttcgagaaatgaagcgcggaggatttgaaccgaacaactttacttttccatttgtggcgaaggcgtgtgctaggctcgctgatgttgggtgctgtgagatggttcatgcacatttgataaagtctccgttttggtctgatgtgttcgttgggacagcgacggttgacatgtttgtgaaatgtaattctgtggattatgccgccaaggtgtttgagagaatgcctgagagagatgctaccacttggaacgcaatgctgtctggtttctgtcagtcgggtcacacggataaggcgttttctctatttcgtgaaatgagactcaacgagattacacctgattctgtgactgttatgaccttgattcaatctgcatcgtttgaaaaaagtttgaagcttttggaggctatgcatgcggttgggatacgtttaggtgtagatgtacaagttacagttgccaatacttggatttctacttatgggaaatgtggtgatttggattcagcaaagttggttttcgaagctattgacagaggtgacagaactgttgtgtcttggaattctatgttcaaagcatattcagtttttggtgaagcatttgatgcttttggtctttactgtttgatgctgcgtgaagagtttaagccggatttgagtacgtttattaacttggctgcatcgtgtcagaaccctgaaacactaacacaaggaagattgattcattctcatgcaatccatctcggtacagatcaagatatagaagcgatcaatacctttatttctatgtattcgaaatccgaggatacctgttcagcgaggcttttgtttgacataatgacttccagaacatgtgtttcttggactgtgatgataagcgggtatgctgagaagggcgacatggatgaagctttggccttatttcatgccatgatcaaatcaggagagaaaccagatctagttaccttactctccctcatttcaggttgtggaaaatttggttcacttgagactggaaaatggatagatgctagagcagatatatatgggtgcaagagagataatgtcatgatttgcaatgctcttattgatatgtactcaaaatgtggaagtatacatgaagctcgagacatattcgataacacgcctgagaaaactgttgtcacatggactacaatgatagctggatatgctttgaacggtatctttctcgaagctttgaaactttttagcaagatgatagatttggattataaaccaaaccacataacattccttgccgtccttcaagcttgtgctcattcgggttctctggagaaaggttgggagtatttccacatcatgaaacaagtatacaacatcagccctggactagaccattactcttgtatggtagatcttcttggaagaaaaggaaagctcgaagaagcattagaactcatccgtaacatgtcagctaaacccgatgctggcatatggggtgcattgctaaatgcctgcaagatccaccgtaatgtaaagatagctgagcaagccgctgagagtctttttaacttagaaccgcaaatggcagctccttatgtagaaatggcaaacatatatgcagctgctggtatgtgggatggttttgcgaggattagatcaattatgaaacagaggaacattaagaagtatccaggtgaaagcgtgatccaggtaaacggaaagaatcacagtttcactgtaggagaacatggtcatgtagagaatgaagtcatatactttacgctgaatggtttgagtttgtttgccaaagataaacacgtattgtataaagatgtgtacaaagaacaaagttatgaacttttcatttga

SEQ ID NO: 2843 - DNA, 4386 bp, Arabidopsis thaliana
  Clone ID: AT_T13C7.C1.o5.tg
atggttcctggaattcgtgttactcgaaaatcagctcgctcgaaggtgtcgacgggttctgttgctcggaaatcatcaaagtccaccggtgttctcgattctgcttccgattctcctccaatggctcgttctcagaccgctggagcttcgcgaggtgttttctcatcgggatttgatgatccgacgcagtctcctttcttccttcatagtgcagatcatccaggtttgagcatcatttctcatcgtttagatgaaacaacttatggtgactggagtgtggctatgaggatctcgttggatgctaagaacaaactaggatttgtagacggatctttacctcgtcctttagaatcggatccaaatttccgtttatggtctagatgcaacagtatggtgaaatcctggttgcttaactctgtttctcctcagatctatcgtagcatcttacgtctgaatgatgctacagatatttggcgtgatctctttgacaggtttaacctgacgaatcttccacgtacctacaatctgacacaggagattcaggatcttcgtcaaggaacaatgtctctatctgagtactatactcttttaaagactctctgggatcagcttgacagtacagaggctttggatgatccttgtacttgtggaaaagctgttcgtctgtatcagaaggcagagaaagctaagataatgaaatttcttgcaggattgaatgagtcttatgccattgttcgtagacagatcattgcaaagaaggcacttcctagtttggcagaagtttatcatatcttggatcaggataatagccagaagggattctttaatgttgttgctccacctgcagcttttcaagtctctgaggtatctcattctcctatcacttctcctgagataatgtatgttcagagtggaccaaacaaaggtcgtcctacgtgttcattctgcaacagagttggtcatatagctgaaagatgctataagaagcatggttttccaccaggtttcactcctaaagggaagtcctctgataaacctccaaaacctcaggcagtggcagctcaggttactctttctccggataagatgacaggacaacttgagactcttgctggtaacttctcccctgatcagatacagaatttgattgccttgttcagttctcagttgcagccacagattgtttctcctcagactgcttcttctcagcatgaagcaagttcttctcagtctgttgctccttctggtatcttattctctccttccacatattgctttattggcatcttggcagtttcacataactctttgtccagtgacacttgggttattgactctggggctacacatcatgtgtcccatgacagaaaattgtttcagactttagatacttctattgtgagttttgtgaatcttccaacaggtccaaatgtcagaatcagtggagtgggaacagttttgataaacaaagacattattctccagaatgttttgtttattcctgaattcagattgaatttgatcagtatcagctctttgactactgaccttggtactagagtgatctttgatccttcttgctgtcaaatacaggatcttaccaaggggttgacgcttggagaaggtaaaaggattgggaatctctatgtgttggacacacaatctcctgctatctcggtgaatgcagttgtggatgtgagcgtgtggcacaagagacttggacacccatctttttcaagactggattctctttctgaagttttgggaactactagacataagaataagaaatcagcttattgtcatgtttgtcatttagccaaacaaaagaagttgtcatttccttctgcgaacaacatttgtaattcaacatttgagctgttacacattgatgtttggggacccttttcagtggagacagttgaaggatacaaatatttcttaactatagttgatgatcattctagagcaacgtggatttatttgcttaagtctaagagtgacgtcctcacagtgtttcctgccttcattgacttagttgagaatcagtatgatacaagagttaaatctgtgagatctgataatgctaaagagttggctttcacagaattttacaaagcaaagggaatcgtttcttttcattcttgtcctgagacaccagaacaaaattcagtggttgagaggaagcatcagcatattcttaatgtggctcgggctttgatgtttcagtctaacatgtctttgccatattggggtgactgtgttttaactgctgtcttcttgattaacaggacaccttctgctttgttatcaaacaagactccttttgaggttctcactggaaagctaccagattactctcagctcaagacatttggttgcctttgctacagctctacttcatcgaaacagcgacacaagttccttccaaggtcaagagcgtgtgttttcttgggctatccgtttggttttaaaggctacaagttgttggatttagagagcaacgtggttcatatatcgaggaatgtggagtttcatgaggagttgtttccattagcgagttctcaacagtctgctactacagcttcagatgttttcacaccaatggatcctttgtcctcaggtaattccatcacttctcatcttccatcaccacaaatttctccatcaacacaaatttctaaacgtaggattactaaattccctgctcatctccaagactatcactgttattttgtcaataaagatgactcacatcctatttcatcttctctttcttactctcaaatctcaccatctcatatgttatacatcaataacatttccaaaattccaatccctcaatcttatcatgaggcaaaggattccaaagaatggtgtggtgctattgatcaggaaattggtgcaatggaaaggactgatacttgggagattacaagtttacctcctgggaagaaggcagttggatgtaagtgggtatttacagtgaagtttcacgcagatggcagtttggaaagattcaaggccagaattgttgctaagggttatactcagaaggaaggtttggattacactgagactttctctcctgttgctaagatggccacagtaaagttacttttgaaagtttcagcttctaagaagtggtatttgaatcagctggatatatctaatgcttttctcaatggagatttagaggaaaccatatatatgaagctgcctgatggttatgcagatattaagggaacttctctgccacctaatgttgtttgtcgtttgaagaagtccatttatggtcttaaacaggcatctcgtcaatggtttttgaagttttctaactctctgttggctctgggtttcgaaaaacagcatggtgatcatactctctttgttcgctgtattggttctgagttcattgtcctcttagtttatgttgatgacatagtgattgcgagtactacagaacaagcagcacagtcgttgacagaggctttaaaagctagctttaagctgagggaacttggtccactgaagtatttcttgggtttagaggttgctcgcacttctgaaggtatttccctatctcaaaggaagtatgctttagaattgctcacttctgcagatatgttggactgtaaaccatcctccatacctatgactccgaatattagattatctaagaatgatggtctactcttggaggacaaagaaatgtatcgaagacttgttggcaagttgatgtatctgaccataactcgccctgatatcacatttgcggtgaacaagttatgtcagttctcttctgctcctcgtactgcacatcttgcagctgtctacaaagtcttacaatacattaaaggtacagtgggtcaaggtctgttttattctgctgaggatgatctgactttaaaaggctatactgatgcggattggggtacttgcccagatagtcgtcgatcaaccacaggtttcactatgtttgttggttcctctctgatatcctggcgctccaagaaacagcctactgtctcacggtcgtctgcagaggcagagtatcgagcattggctttggcttcttgtgaaatggcgtggctgtctacactgttattggctttgcgtgttcattcaggtgtgcctattttatactctgacagtaccgccgctgtgtatatagccactaacccagtgtttcacgaacgaacgaaacacatcgaaatcgattgtcacaccgttcgtgagaagctggataatggtcagttgaagctgcttcatgtcaagactaaagatcaggttgctgatatccttactaaaccactcttcccttatcaatttgctcatttattgtccaagatgagtatccaaaacatctttgtattctcatcttga

SEQ ID NO: 2844 - DNA, 2181 bp, Arabidopsis thaliana
  Clone ID: AT_F4H5.C1.o23.tg
atggcaaacgacgagcttgtgaagtctgagaaccgtgatatctcgtttagacaagatcatttcacgggtagtcgacacaactatgaactcttcgttggtcatgactacaattccgccttcgaacaacttctcgatatcaacctccagattggtgcctcctgtaacggaaatgagctctggaacaacctccaggaccacagagggatcgatgaaacgaaagaagtggcatgtttagatgttaaccaaaatgacggctatcgctcctttcctgataatgatgactctgagattgataaatcaactgttattgaagccacgggcgctatccataaggtagagtctcaagataccgatgataaattagagttggagatgagtcaaagcaccgagttttctcagaaatcagtcatgccttctcctagctctcaatgctggtccatgtccggtgctggtactgaccatgaaatggtcgttggtatggaattttctgatgcctatgcttgtaggagagcgattaaaaatgcagcaatttctctgcgttttgagatgcgaacgattaaatctgacaagactcgcttcacagcaaagtgcaacagcaagggttgcccatggaggattcactgcgccaaagtttctaatgctccaacttttacgataaggactattcacgggagtcatacttgtggtgggatttcgcatcttggtcatcagcaagcttcagtccagtgggttgctgatgttgttgctgaaaagctgaaagaaaatcctcatttcaaaccaaaggagatactagaggagatttatcgagttcatggtatttcactgtcctacaagcaggcatggagggggaaagagcgcataatggctactcttcgcgggtctactcttcgtgggtcatttgaagaagaatatcgccttcttccccaatactgtgatgaaatcagaaggtctaatcctgggagcgtcgctgtggttcatgtgaatcccattgatgggtgctttcaacacttgtttatttctttccaagcatcaatctctggttttttaaatgcttgccggcctcttattgcactggacagtacagttttaaagagcaaatatccagggacgttgctgcttgccactggatttgatggagatggagctgtgtttcctttggcattcgctattgttaacgaagagaacgatgacaactggcatcggtttctctccgagcttcgtaagattctagatgagaatatgccaaagcttaccatattgtccagcggagagagacccgttgttgatggggtagaggctaatttcccagcagcatttcatggcttttgtctccattatctcacagaacgattccaaagagaattccaaagctctgttcttgtagaccttttttgggaggctgcgcattgtctcacagttctcgagttcaaatcaaaaatcaacaagatcgagcagatatccccggaagcttcgttatggatccaaaacaagtctcctgctcgatgggcatcatcatactttgaaggaacaaggtttggacaattaactgcaaatgttattaccgagtcactcagcaattgggttgaagatacctcaggtcttcctataatccaaacgatggagtgtatccaccgccatttgataaatatgttgaaagaacgccgtgaaacaagcttgcattggtctaatgtgcttgttccttctgctgagaaacaaatgcttgctgctatagaacaatctcgtgctcaccgagtttacagagcaaacgaagcagaatttgaagtcatgacttgtgaaggaaacgtcgttgtaaatatcgaaaactgttcttgtttatgcggccggtggcaggtttatggtttgccctgtagccacgccgttggagctctcttgtcttgcgaagaggacgtttatagatacacagagagttgtttcacagtggagaattacagaagagcttatgcagaaactctagagccaatatcagacaaagttcagtggaaagaaaatgattcagagagagacagtgaaaatgtaataaaaacaccaaaggctatgaaaggtgctccgaggaagaggagagtaagggcagaggatcgtgaccgtgtgaggcgtgtggttcattgtggtcggtgtaatcagacaggccatttcagaacaacttgcactgctcctatgtaa

SEQ ID NO: 2845 - DNA, 4371 bp, Arabidopsis thaliana
  Clone ID: AT_T4I9.C1.o16.tg
atggctactcacgctgaagaaatcgttctcgtcaacaccaacatcctcaacgtgaacatgagtaacgttaccaaactcaccagcactaactacctcatgtggagccgccaggttcatgcgctcttcgatggctatgaactcgccggttttctcgatggctctacacccatgccgcctgcaaccattggcacagatgcggttcctcgtgtcaatcccgactacactcgctggagaagacaagacaagctcatctacagtgcaatccttggagccatctctatgtccgtacaacctgcggtatctcgagccactacagcggctcagatctgggagacacttcgcaagatctatgcgaatccaagctatggtcatgtcactcaactccgattcatcactagattcgatcaacttgcgcttcttggaaaacctatggaccatgacgagcaagtagaacgtgtgctggaaaatctgcctgatgattacaaaccagtgatagatcaaattgccgccaaagataccccaccgtctctcacagagatccatgagaggctgataaatcgagagagcaaacttcttgctttgaactcggcagaggtcgtaccaatcactgccaatgtcgttactcaccgcaacaccaacaccaaccgtaatcagaacaatcgtggagacaaccgcaactacaacaacaacaacaatcgctcaaactcttggcagccatcgtcttctggctctcgatccgataatcgccagcccaaaccctacttgggccgatgccaaatatgtagcgtgcaaggacacagtgccaaacgctgccctcaacttcatcaattccaatcaaccaccaatcaacagcaatcgacttctccgttcactccatggcagccccgcgccaatctcgctgtcaactctccatacaatgccaacaactggcttcttgacagcggagcaacccaccatatcacgtcggacttcaacaatctgtctttccatcaaccttacaccggtggtgatgatgttatgattgccgatggatccacaattcccataacacacactggttctgcctctctacctactagttctcgctcactagatcttaacaaagttctatatgttccaaatatacacaaaaacttaatctctgtgtatcgcttatgcaacactaatcgtgtctctgtggaattctttcctgcatcctttcaggtgaaggatctcaacacgggggtcccattactccaaggcaaaactaaagatgagttgtatgagtggcctattgcatcgtctcaagcggtatctatgtttgcgtctccatgctctaaagctactcattcttcatggcattcccgtctcggccatccttcattggcgattttaaattcagttatttccaatcattcacttccagttttaaacccctctcataaacttctttcttgctcagattgttttatcaataaaagtcataaagtgcctttttcaaattcaacaatcacttcgtctaaaccattggaatacatttattcggatgtgtggagttccccaattctttctattgataattatcgctattatgtcatctttgttgatcatttcacccgttatacatggttatatccattaaaacagaaatctcaagtgaaagatacgttcattatcttcaagagtcttgtggaaaatcgttttcaaacaaggattggtacactttattcagataatgggggcgaatttgtggtcttacgggattatttatcgcaacacgggatctctcatttcacctctccaccgcatactccagaacacaatggtctatcagaaagaaagcatcgtcacatagttgagatgggtctcaccttactctctcatgcctctgttcccaagacgtactggccgtatgctttttctgtggcagtttaccttataaatcggcttcccacaccgctacttcagcttcaatcgccgtttcagaaactttttggacaaccgccgaattatgagaagctcaaagtttttggatgtgcctgttatccatggttaagaccgtacaatcgtcacaagctagaagacaaatcaaaacaatgtgcattcatgggttattctcttactcaaagtgcttacttgtgtcttcacattcccactggcagactctacacatctcggcacgtgcagtttgacgaacggtgctttcccttctctacaacaaattttggtgtatccacgtcacaagaacagcgttctgattcagctccgaattggccatctcatacaactctacccacaacaccgttagttttgccggctcccccgtgtttgggtcctcaccttgatacgtcgcctcgtccaccgtcgtcgccgtctccactatgcaccactcaggtatcgtcttctaacttaccttcctcttcgatttcttctccctcttcctctgagcccactgctccaagtcataatgggccgcaacccacggcccagccacatcaaacacaaaactcaaattcaaatagcccaattttaaataacccaaatccaaacagcccaagtccaaatagcccaaatcaaaatagcccattaccacaaagcccaatctcatcaccccacataccaacaccttcgacgagtatctctgaaccaaactcgccgtcctcctcatcaacctctacgcctccgttacctcctgtgttacctgctccaccaattattcaagtcaacgctcaagctccggtcaatactcattcaatggctacaagggcaaaggatggcattagaaaacccaaccaaaagtactcttacgccacgtcactggctgcaaattcagaaccacgcacagcgatacaggcaatgaaagatgatcgttggagacaagcaatgggatcagaaataaatgctcaaatcggcaatcatacatgggatcttgtaccgcctccaccaccatctgtcacgatcgttggttgtcgttggatattcactaagaaattcaattcggatggctcactaaatcggtataaggcaaggcttgtcgccaaaggttacaatcaaagaccgggtcttgattatgcggaaacctttagtcctgtaatcaaatcaacttccattcgtatcgtcttgggtgtggctgttgatcgatcttggcctatccgtcaattggatgtcaataatgcatttctacagggtacacttaccgacgaagtatacatgtcgcaaccaccgggttttgttgataaagatcgtcctgattatgtctgccgcctcaggaaagctatttacgggctgaaacaagctcctagagcatggtatgttgaacttcggacttatttactaacggtgggttttgtgaattccatctcagatacgtcactttttgtgttgcaacgaggtcgatcaattatctatatgcttgtctatgttgacgacatattgatcacagggaatgacacggtcttgttaaaacatactctcgatgcattgtctcagcgtttttctgtcaaagaacatgaggatctacattattttctgggtattgaagcaaaacgagtcccacaaggtcttcacctcagccaacgtcggtacacacttgatcttctcgctcgcaccaatatgctaaccgcgaagccggtcgcaacaccaatggcaacatcaccaaagttgacattgcactccggtaccaaactgcctgacccgacagaatacagaggcatagtgggcagtttacaatatctagcattcactcgtcctgatctctcttatgcggtcaaccgtctgtcacaatatatgcatatgccgacagatgaccattggaatgccctgaaacgtgttctgcgatacttagctggaactccggatcatggcatatttcttaagaaaggcaacacattatcattacacgcatactctgatgcggattgggccggcgataccgatgactatgtctccactaatggctacattgtttatctcggtcatcatcccatctcttggtcctctaaaaagcagaaaggtgttgtgcgctcatctaccgaagctgaatacaggtcagtggcaaacacttcatctgagctacaatggatttgttccttattgacagaacttggtattcaattgtcacatccaccggtcatctattgtgacaatgtgggagcaacttatctatgtgccaatccggtgtttcattctcggatgaaacatatcgcgttggattatcacttcatccgtaaccaagttcaatctggtgcacttcgtgttgtccatgtctccactcatgatcaattagcagacactcttacaaagcctctgtcccgcgtcgcttttcagaacttctctcgcaagattggagtcatcaaagtccctccatcttgtgggggcgtattgaggatatga

SEQ ID NO: 2846 - DNA, 1593 bp, Arabidopsis thaliana
  Clone ID: AT_T12J2.C1.o8.tg
atgaattctgtctcagttttaactcaaggcaaggaaacagaggtcggaccaaaagttgtagtcgtagactcttccaatgtcaactctgtccctgatccacggtggccgtacttgactcggtggacgcagaattctccttctccatctccatcagtgatttctccttctatctcactggtgaaacccttgacaattggatcctcgccgaaaattgctcgctcttcttctcttgacttcgtgaatcttacttcttcgctggattcgaccttaccggtcactgtcgagcctccaattgaacatgtggtgagtattacatcattgtcttattccgcagaagtgtctcttcctacttccgccttaccgccaatagtgtctgctactctcgacgagtccattgctcctgttaagttggtctcccctactctaaaaggagcttgggcaaagcagctaaagttcacctcgtcatcggcctctcagcaagatgttggtggagcaccgatgcaatctcatcttgaagcaactaaggaggataatgttcgcttcccttgggctgcaaaaatggatccagcggcaaggaacctttacagggcaacctcgccggaattcatggaagacggaattccaaagaggggcttatggcatgttgatgattgtcttatgtttgtagcgccttggtctactgtaaatacatttgatcttcctgaaatatcaactattcctgtctgggtaacccttaaaaatatcccaaaccggttgtactcaattctaggaattagccatattgcatcaggtttaggtgctcctatggctacttacaaacctagacttgacccttccctaatgagtgaggccaatatcttggtggaagtggagttgagtaaagctttccctccaagaattgccgcagttgataagaaaggcaatatatcgatggttaatgttgaatatgcttggatcccagctaaatgtggaaaatgtgggcagttagggcataaggcttcgcgctgtatgaaaccccatttggcacatgaaaaagtaacagaaattgtctcagaggagatcattactcctgctattgtaagtttagctagtgccacaaatttggtatcgccaatcactcttcaaaccaagaccccaattgatgtcccaatcacaaattcaaaaatccaaatcgatacagtcttcgatattgaggctggcccaatccaagacaaagataattgcaccggagtggcagattgctttacaaatgttgaagctgaagttgtaactgaggaaacttgcacagttgaatcagttttcgaaattgcaggcacaaaagataagtttagtcgtttgggttcttcgtttcctgatggggattctcttcattcagatgaagactcaattgtttcagttgagtcagacagtgggtcagaattgatggaacttatgactccatcgggacaacgtcttttgcgcgaaagaccggttaaaccatccatcaaagctaaggagatacaagcgtcctctactactcgaggaagaggtaaccgtgggcgtgggaaccgtggacgcggaaatcgtggacgcgggaaccgtggacgtggctaa

SEQ ID NO: 2847 - DNA, 1440 bp, Arabidopsis thaliana
  Clone ID: AT_T12C14.C1.o30.tg
atggaaagcactagatcagatccagagcttgatgatgactttagtgaaatctacaaggagtatactggtcctgcaagtgctgtgaccaacaacaatatccaagacaaagacaaacctgtcaaacaacgttctgaagaaagatgtgatgaagaagaagagcaacttcctgatcccaactctgtaccaactgatttcactagccgtgaagctaaggtttgggaggctaaatccaaagctactgagaggaattggaagaagaggaaagaggaagagatgatctgtaaaatttgtggcgagtctggtcattttactcagggatgtccatctacacttggtgccaataggaagtctcaagaattctttgaaagggtaccagctagggacaataatgtgagagttttgtttactgagaaagttatggaaagtattgaaagggagaccagctgcaagattaaattggatgagaagttcataattgttagtggcaaggacagattgatcttgaggaaaggtgttgatgctgttcacaaggttaaggaggatggtgagatgaaaagttcttctgtttctcacaggagcagatccaggtcacctaggcgaacttctgttggaccatcacgtgctcgaaactctgaacctcaaaggcagcagctgccatcacatggttcgtcaagtttcccagagcgctctggaaggcaagataagtttgtggataatcgtttccgcgaagagactcgtgttcgtgagaatcagagaaacgttcctcgaggatcaccacaagcttatggtagtgacagagctcggagtcgttctacacattcgaaatctccagggagacctcgttatagtggatgggataaaccgtatgataggcaaaagcctgaggtgagtggttataggtctgaaagatgggatcaagagagaatgggtggctccagcgatattcaggtgagtcatcagtttgaacgccctcctttcccacaaacgttagaagaactagaattggaatatacgagggatgcattggagcttgaaaagaaacgcgataaggaagaagatgaggagaacaacaagcatcgtgagacaatccgggaactgagagagagttacatgaagaaactggctggactaaggggtatgaatgctaaacaatgggatgacttccttcaactcgatgctcagagacgtcaacagcaagcacggcagcaaaactctggtctgagttatggtaactatagacagtttcctccttatgctgagtttgatgatggctactcttcaaatcctcctccctatggtggaaacaatatgccaatggattccaagggaagatatccaaatcatggagataactattcttcaaggcatcaagacaacaattatggtgggttccaacgccagagacgtgaagaatatggaaaagcctacaatcgttattag

SEQ ID NO: 2848 - DNA, 1773 bp, Arabidopsis thaliana
  Clone ID: AT_F4H6.C1.o8.tg
atggtgtcacacattgtgactccaatcttcaacaaagagaattatggtttttggcgcatcaagatgaaaacaattttccagacaaagaaactgtgggaaattgttgacgaaggagttccaaaaccacccgcagaaggagatcatagccctgaagcagtgcaacaaaagacacgatgtgaagcagcatccttaaaggatctaaccgctttgcaaattcttcaaactgccgtctcagattccatatttccgagaatcgcccctgcatcaagcgcacttggaaagccttgggagtatgagaatttgaagatgaaagaaagtgacaatatcaacactttcatgaccaagttgattgagatgggaaatcaactgagagttcatggagaagagaaatcagactatcaaatagtgcaaaaaatcctaatttctcttccgaaaagatttgacatcatagtggctatgatgaagcaaacgaaggatctgacttcgttgtccgctgggaaatggtgtgacgtttgcgaacgtaaaaatcacaatgagagtgattgctggatgaagaagaacaaaggtgttctttcgcaacaagtggggaacaatgagagaagatgtttcgtgtgtaacaaaccgggacatctagcaaagaactgcagacttagaaggaccgagcgagtggatctaagtctagaagaaacaaatgatgatgaggatcacatgctgttcagtgcagtcgaagaagaaacatcatcaaacgtgaatgatgagacatggctagttgacagcggatgcactaaccatatgaccaaggaagttaaatacttcatcactcttgatcaaagtgtaaagggatacagagtcttatttgaagacaacagatgtctcatcaacgatcctcaaggaagaaggatactggatatgaagatgatgcagaagagttttccattgagatggataaaggcgaacacaagtgctttactagcaagtgagatcttgcgacaagggaaggagaaagcacaacggttcattgcgatacctaagccactgaagctggatgctgagcattacgggtattggaaggtgttgatcaagcgatcgattcaaagtatcgacatggatgcatggtttgcagtagaagatggttggatgcctcctaccacaaaggatgcaaagagagacattgtttcgaaatcaaggactgaatggattgcggatgagaagacagcagccaatcacaactctcaggcactgtctgtgatttttggatctttgttaaggaataagttcactcaggttcaaggatgcttatcagcaaaggaagtatgggaaattctgcaagtctcatttgaatgcaccaacaatgtgaagcgtactcgtctggacatgcttgcgtcagagtttgagaatctgaccatggaagctgaagaatccgtggatgacttcaacggcaaattgagctccatcacacaagaggctgttgtcctaggaaaaacgtacaaggacaagaagatggtgaaaaaatttctcaggagtctaccagacaagtttcaatcacacaagtcagcgattgatgtatctttgaactcagatcaattaaagtttgatcaggttgttgggatgatgcaggcgtatgatactgataaggaagaaattctcaacagctacgcaacctattttggtgccattgaagatgatgaccacacggttgaggaagatgctcagatgggaacgatcaagagtctgatactgattcagagtgattctgaaaaagaaggaaaataa

SEQ ID NO: 2849 - DNA, 4044 bp, Arabidopsis thaliana
  Clone ID: AT_F9O13.C1.o20.tg
atgcaaggctcctcacatcaagtcatccctatattcgatggggagaaatatgacttctggagcattaaaatggcaaccattttcaggaccagaaaactatggtccgtggttgaagaaggcgtaccggtcgaaccggtacaagcggaagaaactcctgaaactgcaagagcaaagacgctcagagaagaagcagtgacaaatgatacaatggctttgcaaatcttgcaaactgccgtaaccgatcaaatcttctcacggattgcagcggcatcatcatcaaaagaagcgtgggatgtgttgaaggacgaataccaaggatctccacaagtccgattggttaaacttcaatcgctgcgtagagagtacgagaacttgaagatgtatgacaatgacaacatcaagacattcaccgataagttaattgttctggaaattcaattgacttatcatggtgaaaagaagacaaacactcaactcatacagaagatactcatctctctcccagccaagttcgacagcattgttagtgttctagagcaaactcgcgacttggatgcactaacaatgtcagaacttcttggtatcttaaaagcacaagaagcgagagtaactgcaagagaagaaagcacaaaagagggagcattctatgttcggtccaaaggaagagaatccggtttcaaacaagacaacaccaacaaccgtgtcaatcaagacaagaaatggtgtggttttcacaagagtagcaaacacacagaagaagagtgtcgagagaaaccgaagaatgacgatcatggcaaaaataagagaagtaacatcaagtgttacaagtgtgggaagatcggccattacgcaaatgagtgtcgctcgaagaacaaagagagagctcatgtaactcttgaagaagaagacgtaaatgaagatcatatgttgtttagtgcaagtgaagaagaatcaacaacgttaagagaagatgtttggttggtagacagtggctgcacaaaccatatgacgaaagaagagagatacttttcaaacatcaacaaaagtatcaaagtcccgattagagtcagaaatggagatatagtcatgacagccggtaaaggagatattaccgtcatgacaaggcatggcaaaagaatcatcaagaatgttttcttagtgcctggtttggagaagaacctattgagcgttcctcaaatcatctcaagcggctattgggtacgttttcaagacaagagatgcatcatccaagatgcaaatggaaaggagatcatgaacattgagatgacggataagagcttcaagatcaagttaagttcagtcgaagaagaagccatgacagccaatgttcaaacagaggaaacatggcacaaaagacttggccatgtaagcaacaagcgcttgcaacaaatgcaagacaaggaattggtaaatgggttaccaagattcaaagtgacgaaggagacatgtaaagcgtgtaatcttgggaagcaatcacgcaagagctttccaaaagaatctcaaacgaagacaagagaaaagcttgagattgtgcatacggatgtgtgcggaccgatgcaacaccaatcgatcgatggaagtcgctactatgtgctgtttttggatgattatactcacatgtgttgggtatacttcctaaaacaaaagtcggagacgttcgcaacgttcaagaaattcaaagcgttggtggagaaacaatcaaactgttccatcaagacgttgagaccgatggaggtgttctgtgaagatgaaggaatcaataggcaagtgactttgccttactcacctcaacaaaatggtgcagcagaacgcaagaatagatcattggtggagatggcaagatcaatgcttgttgaacaagacttacccctcaagttatgggcagaagcggtatatacctcggcgtatttgcaaaatcgcttaccatcaaaagcaatagaagatgatgtgacgcctatggagaagtggtgtggacacaaaccaaacgtgtcacacttgaggatatttggaagcatatgttacgtgcatataccggatcagaaaagaagaaagctagacgctaaagcaaagtgtggtattctcatcggttatagcaatcaaaccaaaggctatagagttttcttactggaagatgagaaggtggaagtatcaagagatgttgttttccaagaagacaagaagtgggattgggataaacaagaagaagttaagaaaacttttgtcatgtccatcaacgacatacaagagtcaagagatcaacaagagacatccagccatgatttgtctcaaatcgatgatcatgctaacaatggagaaggagaaacctcaagtcatgtgttatcccaagtcaatgatcaagaagaacgagaaacttcagaatcaccaaagaaatacaagtccatgaaagagatcttggaaaaggcaccaagaatggagaatgatgaggcggctcaaggcatagaagcttgtcttgttgcaaatgaagaaccacagacttatgatgaagctcgtggtgataaagaatgggaagaagccatgaatgaggagataaaggtgatcgagaaaaacagaacatggaaactagtagacaaaccggagaagaagaatgtgataagcgtgaagtggatctataagatcaagacggatgcaagtggaaatcacgtcaagcacaaggcaagactagttgcgagaggtttttctcaagaatatggaatcgattatcttgagacattcgcccctgtttcaagatatgatacaatacgagctttacttgcgtatgcggctcaaatgaagtggagattgtatcaaatggatgtgaagtcggcgtttctaaacggagagcttgaagaagaagtttatgtcacacaaccacctgggtttgtgatagaaggcaaagaagagaaggtgttaaggctttacaaagccttatatggtcttaagcaagctccacgtgcatggtatgaaagaattgattcttacttcattcaaaatggttttgcaagaagtatgaatgatgcagccttgtacagcaagaagaaaggagaagacgtgttgatcgttagcttgtacgtcgatgatcttatcatcactggaaacaacactcatctcatcaacacattcaagaaaaacatgaaggacgagttcgagatgacagatctcggtttgctaaactacttccttggaatggaagtaaaccaagatgacagtggcatttttctttcacaagaaaaatatgcaaacaaacttattgataagtttgggatgaaagagagcaagagtgtaagcaccccacttacaccacaagggaaaagaaaaggagtagaaggtgacgacaaagaatttgcagatccaacaaagtaccggagaattgtcggaggattgctctatctatgtgcatcaagacctgatgtgatgtacgcaagttcttacctatcaaggtacatgtcatcaccaagcattcaacactatcaagaagccaaacgagtgttgagatacgtcaagggaacgtcaaattttggagtactctttacaagcaaagagacaccaagattagttggctactcggacagcgattggggtggttctctggaagacaagaaaagcaccacaggttatgtctttactcttggtttggctatgttttgttggcagtcttgtaagcagcaaacagtggctcaatcaacggcggaagcagagtacatagcagtgtgtgctgcgacaaaccaagccatatggttgcaaagactttttgaagacttcggcttaaagttcaaagaaggtattcccatcttatgtgacaacaagtcggcaattgcgattggaaggaatcctgtgcaacatagaagaacgaagcacatcgagatcaagtatcatttcgtgagagaagccgagcacaaaggactcattcaacttgagtattgcaaaggagaagatcaactcgcggatgtacttaccaaggcgttaagtgtttcaaggtttgaaggtcttagaaggaagcttggagtgaagccgagatatgattaa

SEQ ID NO: 2850 - DNA, 807 bp, Arabidopsis thaliana
  Clone ID: AT_K24M7.C1.o12.tg
atggtgaaccaaaggagaagacttgcgcagaagcgatacaaggaagctaatccagagctgtttccaaaagcagaaccaacgccaccaaaggaccctaataagaagaagaagaagaaaagcttgttcaagaaaaagaaacctggatcttccactgatagacctcagagaacaggctcttccacaagacatcctcttcgagttcctggtatgaaacctggagaaggctgttttatatgtcattccaaaacccatattgctaagctttgtcctgaaaaatctgagtgggagagaaacaagatatgcttgcaatgtaggaggagagggcatagtcttaaaaactgccctgaaaagaacaatgagagctccgagaagaagctctgttacaattgtggagatactggtcattcactttcccattgtccttaccctatggaagatggagggaccaaatttgcaagttgtttcatatgcaagggacaagggcacataagcaagaactgtcccgaaaacaagcatggaatctacccaatgggcgggtgttgtaaagtgtgcgggagtgtggcgcatctcgtcaaagactgtcctgataaattcaaccaagagtcagcccaaccaaagaagacttcaagatttgatgctacaccaagaggaaagctcactaagtttagtggggacgatcttgaagacgatttcactgaagagcccaaaagcagcaagaagatcaatacctctgatgattcagctcagaatagtgtcgaggtgaagaaaaagaaacaaggtccaaagattgtcaatttcgttggatga

SEQ ID NO: 2851 - DNA, 990 bp, Arabidopsis thaliana
  Clone ID: AT_T28A8.C1.o120.tg
atgggacctacgagagctcagagaagtgctgccaaacagagagtggaggttccaaccacctcagccgagagtgcaagaaatggagaacaaacagtaaagtatgttagtggaaatgagcatacacaagtattggtgcaactggtagttggtgttcctcaagtaggagatcgtacgacagtaagcgcagccgtgttgcaagggattcgagacttgtttgaagaaatcattcaaaataattttgtggttagtgatcccgaaggagtcgcggtagtcaagccagtaccaatggaaatacctagttattgggagatgttgaggttcatgagagatttagatatagagactttcaatggtgggacagacccggttaaagcatataactggagaaatatgttggagtgcaaattcaagtcaatgaggtgcccagttgagttttggagggatctagcctcttgctacctaagaggtgaagcacaagagtggtgggaacgtgtgaagcagagagaacaagttggatgtgtggatcaatggtcttttttcaaagaggaattcactagaagatatctcccagaggagaccatagatgatcttgaaatgaagtttttaagacttcaacaaggtaccaagacagtaagaaaatatgagaaggagtttcacagtctcgaaagatttgagagaagaaaaagaggagagcatgagttgattcataaattcatctcggggctgagagtggatatacgcttgtgttgccatgttcgggacttcgacaacatgattgacttggttgagaaggcagcttcgctggagataggacttgaagaagaggctcggtataagaggatcgctcaagaaaaggaagcgatgggatcatatggccaaaccgggcatagtaagagaagatgtcaggaagtgacctgttacaggtgtggtgtagccggacacatagctagagactgtagaatgccttttgatgggaagcaggaaggttaa

SEQ ID NO: 2852 - DNA, 4059 bp, Arabidopsis thaliana
  Clone ID: AT_T20K12.C1.o230.tg
atggcgagtaacaatgttcccttccaagtcccggtgctcacaaagagcaactatgataattggagtctacgaatgaaggctatcctaggagcacatgacgtgtgggagatagttgagaaaggtttcattgaaccggagaatgaaggtagtctttctcaaactcaaaaagatggtttgagagactcaagaaagagagacaagaaagctctctgtctaatctatcaaggattagatgaagatacgttcgagaaggtcgttgaagctacgtcggcgaaagaagcatgggagaagcttcgaacctcttacaaaggtgccgatcaagtcaagaaagtacgtcttcaaactctaagaggagaatttgaagcactacaaatgaaggaaggtgaactcgtctccgattacttctcaagagtgttgacggttactaataaccttaaaagaaacggagagaagctagatgatgtgagaatcatggagaaagttcttagatcattggatctaaaatttgagcatattgtcaccgtcattgaagaaacaaaagatttagaagctatgacaatagagcaacttcttgggtcattacaagcttatgaagaaaagaagaagaagaaagaagatatcgccgaacaagtcctcaatatgcaaattacaaaagaagaaaacggccaaagttaccaaagaagaggtggtggtcaagtacgaggacgaggtcgtggtggatatggaaatggacgtggttggaggccacatgaagacaacacaaaccaaagaggtgaaaactcatcaagaggtcgtgggaaaggacacccaaaatcaagatacgataaatcaagtgtcaaatgctacaattgtgggaagtttggacattatgcttctgaatgtaaagctcctagcaacaaaaaatttgaggagaaggcccactacgttgaagaaaaaattcaagaagaagacatgttattaatggctagctacaagaaagatgaacaaaaagagaatcataagtggtacctcgatagtggtgcaagtaatcacatgtgcgggagaaaaagtatgttcgcggagcttgatgaatcggtgagaggaaatgtggctttaggagatgaatcgaagatggaggtaaaaggtaaaggaaacattctcattcgattgaagaatggagatcatcaatttatttccaacgtttactatattccgagcatgaagacaaacatcttgagccttggacaactcttagagaaaggttatgatattagattaaaagataataacctttcaataagagaccaagaaagcaatctcattaccaaggtgccaatgtcgaaaaatagaatgtttgtcctcaacattcgaaatgacattgcacaatgtcttaagatgtgttacaaagaggagtcttggctatggcatcttcgattcggacatctaaattttggaggattggagttgctttcaaggaaggaaatggtgagagggctaccttgtataaatcatccaaatcaagtgtgtgaaggatgtctacttggaaagcaattcaaaatgagctttccaaaggagtcaagttcaagagcacaaaaaccgttggagctaatacacaccgatgtgtgtggtccgatcaagccgaaatcacttggtaaaagtaattacttccttctctttattgatgatttttcaagaaaaacatgggtatattttttgaaagaaaaatccgaggtgttcgaaattttcaaaaagtttaaagcccatgttgagaaggagagtggtcttgtgatcaaaaccatgagatccgaccgtggaggagaatttacatccaaggagtttcttaagtattgtgaagacaacggcattcgaagacaattaacggtgccaagatcccctcaacaaaatggtgtagtggaaagaaagaatagaacaattcttgagatggcaaggagcatgctcaaaagtaagagactaccaaaagagttgtgggcggaagcggtcgcgtgtgcggtttatctattaaatcgatctccaacaaaaagtgtctccggaaaaacaccacaagaagcttggagcggaagaaagcccggtgtttctcatttaagagtctttggaagtattgctcatgctcatgtaccggatgagaagcggagcaaactagatgacaaaagtgagaagtatatcttcattggttatgataacaactccaaaggctacaagctctataatcccgatacgaagaagacaattattagtcgaaatatagtgttcgatgaagaaggagaatgggattggaactcaaatgaagaagattataacttctttccacattttgaagaagatgagccggagccaacaagagaggagccaccaagtgaagagcctactacaccaccaacttcaccaacaagttctcaaatagaagaaagttcgagtgaaaggactccgcgttttagaagtatacaagagctctatgaggtaaccgaaaatcaagaaaaccttaccttattttgtttatttgcggagtgcgaacccatggatttccaaaaagccattgaaaagaagacttggagaaatgccatggatgaagagatcaaatcaatacaaaagaatgacacatgggagttaacttcacttccaaatggacacaaggcaattggcgtgaagtgggtgtataaagcaaagaaaaactctaaaggagaagtggaaagatacaaagcaagattggttgcaaaaggttatagtcaaagagtcggaattgactatgacgaggtatttgctcccgttgctcgtctagaaacggttagactaatcatctcactagcggctcaaaacaagtggaagatacatcaaatggatgtcaagtcggccttcttaaatggagatcttgaagaagaagtttacattgagcaaccacaaggctacatagtcaaaggtgaagaagacaaagtcttgaggctaaaaaaggtgctttatggattaaaacaagccccaagagcttggaatactcgaattgacaagtatttcaaggagaaagatttcatcaagtgtccatatgagcatgcactctatatcaaaattcaaaaagaagatatattgatcgcatgcttatatgtagatgacttgatattcacgggtaacaatccaagcatattcgaagaattcaagaaagagatgacgaaggagttcgagatgacggacattggattgatgtcttactatctcggaattgaagtaaaacaagaagacaatggaatattcataactcaagaaggctatgctaaggaggtacttaagaagttcaagatagatgactcaaatcccgtttgtacaccaatggaatgcggaatcaaactatcaaagaaagaagaaggggaaggagtggatccaacaacctttaagagcttggttggaagcttgagatacttaacatgcacaaggcccgatattttatatgcggtcggagttgttagtcgttacatggagcatccaacaacaactcatttcaaagcggcaaaaaggattcttcgctatatcaaaggtactgtaaactttggcttacattattcaactactagtgattacaagcttgttggatatagcgatagcgattggggtggagacgtagatgaccgaaagagtacaagtggttttgtgttttacattggagacacggctttcacatggatgtcgaagaaacaaccaattgtcactctatccacttgtgaagcggagtatgtagcggctacgtcatgtgtatgccatgctatttggttaagaaacctcttgaaggagttaagcttaccacaagaggaaccaacgaagatctttgtggacaacaagtcggcaatagctttggcgaagaacccggtcttccatgatcgaagtaaacacattgacacacgctatcactacattagagagtgtgttagcaagaaggacgtgcaattggagtatgtgaagacacatgatcaagtagccgatttttttaccaagcctctcaagcgtgaaaactttatcaagatgaggagtttgcttggagtagcaaaatcaagtttaagagggggtgttgaaagttaa

SEQ ID NO: 2853 - DNA, 3819 bp, Arabidopsis thaliana
  Clone ID: AT_T16L24.C1.o270.tg
atggcgagtaacaatgttcccttccaagtcccggtgctcacaaagagcaactatgataattggagtctacgaatgaaggctatcctaggagcacatgacgtgtgggagatagtcgagaaaggtttcattgaaccggagaatgaaggtagtctttctcaaactcaaaaagatggtttgagagactcaagaaagagagacaagaaagctctctgtctaatctatcaaggattagatgaagatacgttcgagaaggtcgttgaagctacgtcggcgaaagaagcatgggagaagcttcgaacctcttacaaaggtgccgatcaagtcaagaaagtacgtcttcaaactctaagaggagaatttgaagcactacaaatgaaggaaggtgaactcgtctccgattacttctcaagagtgttgacggttactaataaccttaaaagaaacggagagaagctagatgatgtgagaatcatggagaaagttcttagatcattggatctaaaatttgagcatattgtcaccgtcattgaagaaacaaaagatttagaagctatgacaatagagcaacttcttgggtcattacaagcttatgaagaaaagaagaagaagaaagaagatatcgtcgaacaagtcctcaatatgcaaattacaaaagaagaaaacggccaaagttaccaaagaagaggtggtggtcaagttcgaggacgaggtcgtggtggatatggaaatggacgtggttggaggccacatgaagacaacacaaaccaaagaggtgaaaactcatcaagaggtcgtgggaaaggacacccaaaatcaagatacgataaatcaagtgtcaaatgctacaattgcgggaagtttggacattatgcttctgaatgtaaagctcctagcaacaaaaaatttaaggagaaggccaactacgttgaagaaaaaattcaagaagaagacatgttattaatggctagctacaagaaagatgaacaagaagagaatcataagtggtacctcgatagtggtgcaagtaatcacatgtgcgggagaaaaagtatgttcgcggagcttgatgaatcggtgagaggaaatgtggctttaggagatgaatcgaagatggaggtaaaaggtaaaggaaacattctcattcgattgaagaatggagatcatcaatttatttccaacgtttactatattccgagcatgaagacaaacatcttgagccttggacaactcttagagaaaggttatgatattagattaaaagataataacctttcaataagagacaaagaaagcaatctcattaccaaggtgccaatgtcgaaaaatagaatgtttgtcctcaacattcgaaatgacattgcacaatgtcttaagatgtgttacaaagaggagtcttggctatggcatcttcgattcggacatctaaattttggaggattggagttgctttcaaggaaggaaatggtgagagggctaccttgtataaatcatccaaatcaagtgtgtgaaggatgtctacttggaaaccaattcaaaatgagctttccaaaagagtcaagttcaagagcacaaaaaccgttggagctaatacacaccgatgtgtgtggtccgatcaagccgaaatcacttggtaaaagtaattacttccttctctttattgatgatttttcaagaaaaacatgggtatattttttgaaagaaaaatccgaggtgttcgaaattttcaaaaagtttaaagcccatgttgagaaggagagtggtcttgtgatcaaaaccatgagatccgacagtggaggagaatttacatccaaggagtttcttaagtattgtgaagacaacggcattcgaagacaattaacggtgccaagatcccctcaacaaaatggtgtagcggaaagaaagaatagaacaattcttgagatggcaaggagcatgctcaaaagtaagagactaccaaaagagttgtgggcggaagcggtcgcgtgtgcggtttatctattaaatcgatctccaacaaaaagtgtctccggaaaaacaccacaagaagcttggagcggaagaaagcccggtgtttctcatttaagagtctttggaagtattgctcatgctcatgtaccggatgagaagcggaacaaactagatgacaaaagtgagaagtatatcttcattggttatgataacaactccaaaggctacaagctctataatcccgatacgaagaagacaattattagtcgaaatatagtgttcgatgaagaaggagaatgggattggaactcaaatgaagaagattataacttctttccacattttgaagaagataagccggagccaacaagagaggagccaccaagtgaagagcctactacaccaccaacttcaccaacaagttctcaaatagaagaaagttcgagtgaaaggactccgcgttttagaagtatacaagagctctatgaggtaaccgaaaatcaagaaaaccttaccttattttgtttatttgcggagtgcgaacccatggatttccaagaagccattgaaaagaagacttggagaaatgccatggatgaagagatcaaatcaatacaaaagaatgacacatgggagttaacttcacttccaaatggacacaaggcaattggcgtgaagtgggtgtataaagcaaagaaaaactctaaaggagaagtggaaagatacaaagcaagattggttgcaaaaggttatagtcaaagagccggaattgactatgacgagatatttgctcccgttgctcgtctagaaacggttagactaatcatctcactagcggctcaaaacaagtggaagatacatcaaatggatgtcaagtcggccttcttaaatggagatcttgaagaagaagtttacattgagcaaccacaaggctacatagtcaaaggtgaagaagacaaagtcttgaggctaaaaaaggtgctttatggattaaaacaagccccaagagcttggaatactcgaattgacaagtatttcaaggagaaagatttcatcaagtgtccatatgagcatgcactctatatcaaaattcaaaaagaagatatattgatcgcatgcttatatgtagatgatttgatattcacgggtaacaatccaagcatgttcgaagaattcaagaaagagatgacgaaggagttcgagatgacggacattggattgatgtcttactatctcggaattgaagtaaaacaagaagacaatggaatattcataactcaagaaggctatgctaaggaggtacttaagaagttcaagatggatgactcaaatcccagcttggttggaagcttgagatacttaacatgcacaaggcccgatattttatatgcggtcggagttgttagtcgttacatggagcatccaacaacaactcatttcaaagcggcaaaaaggattcttcgctatatcaaaggtaccgtaaactttggcttacattattcaactactagtgattacaagcttgttgtatgccatgctatttggttaagaaacctcttgaaagagttaagcttaccacaagaggaaccaacgaagatctttgtggacaacaagtcggcaatagctttggcgaagaacccggtcttccatgatcgaagtaaacacattgacacacgctatcactacattagagagtgtgttagcaagaaggacgtgcaattagagtatgtgaagacacatgatcaagtagccgatatttttaccaagcctctcaagcgtgaagactttatcaagatgaggagtttgcttggagtagcaaaatcaagtttaagagggggtgttgaaagttaa

SEQ ID NO: 2854 - DNA, 4059 bp, Arabidopsis thaliana
  Clone ID: AT_F11I4.C1.o21.tg
atggcgagtaacaatgttcccttccaagtcccggtgctcacaaagagcaactatgataattggagtctacgaatgaaggctatcctaggagcacatgacgtgtgggagatagtcgagaaaggtttcattgaaccggagaatgaaggtagtctttctcaaactcaaaaagatggtttgagagactcaagaaagagagacaagaaagctctctgtctaatctatcaaggattagatgaagatacgttcgagaaggtcgttgaagctacgtcggcgaaagaagcatgggagaagcttcgaacctcttacaaaggtgccgatcaagtcaagaaagtacgtcttcaaactctaagaggagaatttgaagcactacaaatgaaagaaggtgaacttgtctccgattacttctcaagagtgttgacggttactaataaccttaaaagaaatggagagaagctagatgatgtgagaatcatggagaaagttcttagatcattggatctaaaatttgagcatattgtcaccgtcattgaagaaacaaaagatttagaagctatgacaatagagcaacttcttgggtcattacaagcttatgaagaaaagaagaagaagaaagaagatatcatcgaacaagtcctcaatatgcaaattacaaaagaagaaaacggccaaagttaccaaagaagaggtggtggtcaagtacgaggacgaggtcgtggtggatatggaaatggacgtggttggaggccacatgaagacaacacaaaccaaagaggtgaaaactcatcaagaggtcgtgggaaaggacacccaaaatcaagatacgataaatcaagtgtcaaatgctacaattgtgggaagtttggacattatgcttctgaatgtaaagctcctagcaacaaaaaatttgaggagaaggccaactacgttgaagaaaaaattcaagaagaagacatgttattaatggctagctacaagaaagatgaacaagaagagaatcataagtggtacctcgatagtggtgcaagtaatcacatgtgcgggagaaaaagtatgttcgcggagcttgatgaatcggtgagaggaaatgtggctttaggagatgaatcgaagatggaggtaaaaggtaaaggaaacattctcattcgattgaagaatggagatcatcaatttatttccaacgtttactatattccgagcatgaagacaaacatcttgagccttggacaactcttagagaaaggttatgatattagattaaaagataataacctttcaataagagaccaagaaagcaatctcattaccaaggtgccaatgtcgaaaaatagaatgtttgtcctcaacattcgaaatgacattgcacaatgtcttaagatgtgttacaaagaggagtcttggctatggcatcttcgattcggacatctaaattttggaggattggagttgctttcaaggaaggaaatggtgagagggctaccttgtataaatcatccaaatcaagtgtgtgaaggatgtctacttggaaagcaattcaaaatgagctttccaaaggagtcaagttcaagagcacaaaaatcgttggagctaatacataccgatgtgtgtggtccaatcaagccgaaatcacttggtaaaagtaattacttccttctctttattgatgatttttcaagaaaaacatgggtatattttttgaaagaaaaatccgaggtgttcgaaattttcaaaaagtttaaagcccatgttgagaaggagagtggtcttgtgatcaaaaccatgagatccgaccgtggaggagaatttacatccaaggagtttcttaagtattgtgaagacaacggcattcgaagacaattaacggtgccaagatcccctcaacaaaatggtgtagcggaaagaaagaatagaacaattcttgagatggcaaggagcatgctcaaaagtaagagactaccaaaagagttgtgggcggaagcggtcgcgtgtgcggtttatctattaaatcgatctccaacaaaaagtgtctccggaaaaacaccacaagaagcttggagcggaagaaagtccggtgtttctcatttaagagtctttggaagtattgctcatgctcatgtaccggatgagaagcggagcaaactagatgacaaaagtgagaagtatatcttcattggttatgataacaactccaaaggctacaagctctataatcccgatacgaagaagacaattattagtcgaaatatagtgttcgatgaagaaggagaatgggattggaactcaaatgaagaagattataacttctttccacattttgaagaagatgagccggagccaacaagagaggagccaccaagtgaagagcctactacaccaccaacttcaccaacaagttctcaaatagaagaaagttcgagtgaaaggactccgcgttttagaagtatacaagagctctatgaggtaaccgaaaatcaagaaaaccttaccttattttgtttatttgcggagtgcgaacccatggatttccaagaagccattgaaaagaagacttggagaaatgccatggatgaagagatcaaatcaatacaaaagaatgacacatgggagttaacttcacttccaaatggacacaagacaattggcgtgaagtgggtgtataaagcaaagaaaaactctaaaggagaagtggaaagatacaaagcaagattggttgcaaaaggttatattcaaagagccggaattgactatgacgaggtatttgctcccgttgctcgtctagaaacggttagactaatcatctcactagcggctcaaaacaagtggaagatacatcaaatggatgtcaagtcggccttcttaaatggagatcttgaagaagaagtttacattgagcaaccacaaggctacatagtcaaaggtgaagaagacaaagtcttgaggctaaaaaaggcgctttatggattaaaacaagccccaagagcttggaatactcgaattgacaagtatttcaaggagaaagatttcatcaagtgtccatatgagcatgcactctatatcaaaattcaaaaagaagatatattgatcgcatgcttatatgtagatgatttgatattcacgggtaacaatccaagcatgttcgaagaattcaagaaagagatgacaaaggagttcgagatgacggacattggattgatgtcttactatctcggaattgaagtaaaacaagaagacaatggaatattcataactcaagaaggctatgctaaggaggtacttaagaagttcaagatggatgactcaaatcccgtttgtacaccaatggaatgcggaatcaaactatcaaagaaagaagaaggggaaggagtggatccaacaacctttaagagcttggttggaagcttgagatacttaacatgcacaaggcccgatattttatatgcggtcggagttgttagtcgttacatggagcatccaacaacaactcatttcaaagcggcaaaaaggattcttcgctatatcaaaggtaccgtaaactttggcttacattattcaactactagtgattacaagcttgttggatatagcgatagcgattggggtggagacgtagatgaccgaaagagtacaagtggttttgtgttttacattggagacacggctttcacatggatgtcgaagaaacaaccaattgtcgttctatccacttgtgaagcggagtatgtagcggctacgtcatgtgtatgccatgctatttggttaagaaacctcttgaaggagttaagcttaccacaagaggaaccaacgaagatctttgtggataacaagtcggcaatagctttggcgaagaacccggtcttccatgatcgaagtaaacacattgacacacgctatcactacattagagagtgtgttagcaagaaggacgtgcaattggagtatgtgaagacacatgatcaagtagccgatatttttaccaagcctctcaagcgtgaagactttatcaagatgaggagtttgcttggagtagcaaaatcaagtttaagagggggtgttgaatgttaa

SEQ ID NO: 2855 - DNA, 2781 bp, Arabidopsis thaliana
  Clone ID: AT_MBM17.C1.o2.tg
atgtcgcgacgaggcggtggccccgtgacagtgttgaacgtggcggagaagccgtccgtggcgaagtcagtggcggggattctatcccgtggaactttccggactcgggagggtaggtctcggtacaacaaaatcttcgagttcgattacgccatcaatgggcagccgtgtcgtatgctaatgacctccgtcatcggccacctgatggagcttgagttcgccgatcgttaccgcaaatggcactcctgcgacccggcagatctgtaccaagctccggtcatgaaacacgttcccgaggacaaaaaggatattaagaagacattggaggaggaggcaaggaaaagcgactggcttgtgctgtggcttgattgtgatagggaaggtgaaaacattgcatttgaagttgtagatgtttgcagagctgtcaagcataatctttttatacgcagggctcatttctctgcgttaattgacagggatattcatgaagcagttcagaatcttagagatcctaatcaattgtttgctgaggctgtagatgctagacaagaaatagacctacgcattggtgcttctttcactagatttcagactatgctgctgagagataggtttgctattgactctacgggtgaggagaggagtcgtgttataagttatggtccgtgtcagtttcctacacttggctttattgtcgagcgatactgggagatccaggcacatgaaccagaagagttttggacaatcaactgttctcaccaatcagaagaaggccttgccacctttaattggatgcgtggtcatctcttcgattatgcttcagctgtcatattatatgagatgtgcgttgaggaacctactgccactgtaatgaatgtcccacatccaagggaacgattcaagtatcctccttatcctttgaacacgattgaacttgaaaaacgtgcttcaagatatttccgtctgagttcagagcacaccatgaaggtggcagaagaattatatcaggctggtttcatcagctatcctcgtacggagaccgattctttttcgagcaggacagatttacgtgctatggtggaggaacaaacaagacatcctgcatggggatcatatgcacaaagattattagaacctgaggggggcctctggagaaaccctgctaatggtggtcatgatgacaaggctcacccacccattcacccaacaaagttttctagcggagagtctaactggagcagagatcaccttaatgtatatgagctagttgtccgccattacctagcatgtgtttcccagccagcagttgctgctgaaactacagtcgagattgatatcgctggtgagcgcttttctgcatctgggagagcaatattagccaaaaattaccttgaggtgtaccgctttgaatcatggggtggttcagtgattcccgtgtatgaaaaagggcagcagtttatcccaacaactttgactctcgatgcagctgtaacaaggccaccaccactattgtgtgaagctgacttactgagttgtatggacaaggcaggcattggcaccgatgcgacaatgcacgaccacataaagaaactccttgatcggggttatgcaacaaaggatgctaatacacggttttctccaaccaacctgggtgaggcgcttgtgatgggatatgatgacatggggtatgaactttggaaaccaaatctcagagcccttatggaacatgatatgaatgaagttagcgttggcaggaagaccaaagctgaagttcttgaaacatgtttgcagcaaatgaaagcttgtttcttagatgcaagagtaaaaaaatcaaagctcctagaagcaatgacaattttctttgaaagatctaataacactgatgagagtgaaagtcagacagctggtgaagttgtccgacgatgcaatctctgcaatgaatcagatatggcactcaggaagaaccgggatggcaatttcatggttgggtgcatgaattatcctcagtgtcggaatgcagtctggcttcctggaccgacattggaagcatctgtcactactaatgtttgtcaatcctgtggtccaggcccggtctacaagatacttttcaagttccgtcaaattggaattccaccaggctttgatgttaatcacttaggttgcgtgggtggctgtgatgacattcttaaacagttgatagacatctgtggaactggatcccgttctcaagcaaggagaactccaggtactgcaccgtcaaacaatatccaaggaagcaacacaagacagagtaatgtctgcatacattgtcagcaacgaggacatgcttccacgaattgtccctcacgggttccagcatctcgaaattctcgtcctactgcaacaaatccgagaaacgatgaaagtacagtatcatgtaacacttgtggatcacaatgtgttcttcgtacagccaacacagaagctaacaggggaagacaattcttctcatgtccaacacaaggctgcagtttctttgcatgggaagatagcataaacaacagtagtgggaatgcaacaacagggtctaatagcggcgggagcggtagacgtggcagccgtggtcgtggccgtggaggtagaggcggccaaagcagtggaggacgacgcggctctggaacaagctttgtctctgcaactggagagccagtgagtggtataaggtgcttctcatgtggcgatccttcacattttgctaacgcttgtcctaatcgtaataactctaacggtaactatttctaa

SEQ ID NO: 2856 - DNA, 3414 bp, Arabidopsis thaliana
  Clone ID: AT_F6F22.C1.o13.tg
atggggttaaaagatgctttggtggaacgagctccgttaccaccattaaaggaagaagatgaatctgatccagctaagaagaaacagcggatcgaggaagaaaaagcaagaatcgatcaagatgaaaaggcgatggatatgatcttcataaacgtcggagataaggtactaaggaacatcgaaaattctaagactgcagctgaagcttgggcaaccctagataaactgtatttggtgaagtctcttccaaaccgagtctatcttcaactcaaggtttataattacagaatgcaagactcaaaaactcttgaagagaatgtggatgagttccaaaagatgatttcagatctgaataaccttcagattcaagttcctgatgaagttcaagcaatcttgatattaagtgccttacctgatagctatgatatgctcaaagaaacattgaaatatggaagagagggcattaaacttgatgatgttattagtgcagcgaaatcaaaggaattagaactaagagatagttctggaggatctagacctgtaggggaaggtctttatgtccgaggtaagtctcaggccagaggaagtgatggacctaaatcaacagaaggaaagaaagtctgctggatttgcggaaaggaaggacacttcaagagacaatgttacaagtggcttgaaaagaacaaagcaaatggtgcaggggaaacagcactagtaaaggatgatgctcaagatttggttggtctagtagcctcagaggttaacatgagtgagggaaaggacgatcaagaagagtggataatggatactgggtgttctttccatatgacaccaaggaaggagtatctgatggactttgtggaagctaagtcaggaaaggttagaatggcaaataattctttctctgaggtaaaaggaattggcaaagtcaagtttatcaagaaggatggaacaaatgactggtcaagaaaggtgtgggtttactttctcaagacgaaagatgaggcattcgcatcatttacagaatggaaaaaaatggtggaaacacaaagtgagagaaaactaaagcacctaagaactgataatggtctagagttctgcaatcataagtttgatgaagtgtgcaagaaagagggtatagtaaggcacagaacatgcacatataccccacaacagaatggagttgcagaaaggttgaacagaaccattatgaacaaggtgagaagtatgctgagtgaaagtgggcttgataagaaattttgggctaaagcagcatcaactgcagtgtacttgatcaacagatcaccatcgtcatccatagagaataagattcctgaagaattgtggacatcagcagttccaaatttctctggattgaaaagatttggatgcgtcgtgtatgtttattcacaagaaggaaagctagatcccagagctaagaaaggagtattcgtgggttatccaaatggagtcaagggattcagagtttggatgattgaagaagagagatgttctattagtagaaatgtggtgtttagagaagacgttatgtacaaagacatcctaaaccaatcaacctcaggtatgagttttgatttcccattagctactaaccgaattcctagctttgaatgtgcaggaaacagaaaggaagatgaaatttctgttcaaggtggagtttcagatgatgatacaaaacagtcttcagaagaatctcctataagtacaggatcttcaggacaaaactcaggtcagagaacatatcaaattgccagagacaagcctaagaggcaaacaaagatacctgacaagctgagagattatgagttgaatgaggaagtacttgatgagatagcaggatatgcctacatgattacagaagatggtggaaatcctgagccaaatgactatcaaaaagcacttcaagactctgattataagatgtggttaaaagctgttgacgaagaaatagaatcacttctcaagaacaacacttgggtgttagttaacagagatcagtttcagaaaccaatcggctgtaagtgggtgttcaagagaaagtcaggaattgttggagtagagaaaccaaggtttaaagcaagactggtggttaaaggctattcacaaaaggaaggaatagattatcaggagatcttctcaccagtggtgaagcatgtctcaattcgtctgttactgtcaatggtgactcactgtgacatggaactccaacagatggacgtgaagacggcttttcttcatgggtacctagacgaaacaatctatattgaacaacctgaaggttatgttcataagagatatccggataaggtgtgcttgctgaaaagatctctatatggactgagacaatctccaagacaatggaacaacaggttcaacgagttcatgcagaagattggttatgaaaggagtaaatacgacagctgtgtgtatttcaaagagctacagagtggagaatacatttacctactgttatatgtagatgatattctcatagcttccagagacaagaggacagtatgtgatctaaaggctcttctcaactcagagtttgagatgaaagatttgggagatgccaagaagatacttggaatggagattgtgcgagacagaaaggctggaaccatgtcaatatctcaggaaggttatctgttaaaggtacttgggaattttggaatggaccaagctaaaccagtctttactccaatgggtgctcacttcaagcttaaacctgcaactgatgaagaggttatgagacagtcagaggttatgagggcagttccatatcagagtgcggttggaagcttaatgtactcaatgataggtacaaggccggatctggctcattcagttggattagtctgcagatttatgagcaaacctctaaaggagcactggcaagctgtgaagtggatactaagatacattagagggtcaatagacagaaagctatgttataagaatgaaggagaactcattcttgaaggatactgtgactcagactatgcagcagataaagaaggtagaagatctacttcaggagtgaaggtagtagcgttgtcaagtactgaagcagaatatatggcattgacagatggagccaaagaagcaatttggttaaaaggtcatgtgagtgagctaggttttgtgcagaagacagtgaacatccactgtgactcacaaagtgcgattgcattagcaaagaacgcagtctatcacgagagaaccaaacatatagatgttaagtaccatttcataagggatttggtgaataatggagaagtgcaggtgttgaagatcgatactgaagacaaccctgcagatatattcaccaaggtgttaccagtgagtaagtttcaagatgctcttgaactactcagagtttcacagaattaa

SEQ ID NO: 2857 - DNA, 789 bp, Arabidopsis thaliana
  Clone ID: AT_T26I12.C1.o180.tg
atgctatgtcagttggagattctaggcttagaatctgtcttggttgaagatgctacaccatcagacccgggaagtcaagaggaaggatgcgaacctagggaaggttatgaaggaaactaccagacaaagaccttagccaacatgatctatttgaagcacaagttcacaagcttcaagatggtggagaacaaaagcattgaagaaaatctggatacttctctcaagctagttgcagatctagcaagtttagacatcaacactagtgatgaagaccaggctctacaattcatggctggcttaccaccacaatatgattcactagttgatacactcaagtatgggagtgggaaggataccctgacactaaatgcagtcataagttcagcatactctaaagaaattgagttgaaagaaaagggattgctgaacgtgtcaaaaccagattcagaagcattattgggtgattttaagggcagatcaaacaataagggaaataaaaggccatgtacaggaagttcaagtggaaatgggaaattccagtcaaggccaagtaacaacacaagttgttttatctgtggaaaggaagatcactggaaaagggaatgccctcaaagaaagaaacatgcagaattggctaatattgcaactgagcctccgcaacctttggtgttaactgtgagcactcaaagcacatgcaaagaatgggttatggactctggtcgtacattccatagtacatccgatagagctgtcttgtttgacttcaagaaattcaaagatagagcataa

SEQ ID NO: 2858 - DNA, 738 bp, Arabidopsis thaliana
  Clone ID: AT_F20C19.C1.o14.tg
atgtctgaagatccggagtaccgttgcttcattggtgggcttgcttggacaacgtctgatcgtggtctcagagatgcctttgagaagtatggtcacctcgttgaggccaaggtggttcttgacaagttttctggtcgctcccgtggttttggattcatcactttcgatgagaaaaaagctatggatgaagctattgcagcaatgaatggaatggatttggatgggcgaactatcactgttgataaagctcagcctcatcagggtggtgcaggcagagataatgatggtgaccgtggtcgagaccgtggatatgatcgtgatcgcagtcgtccctctggtgggcgaggtggtggagattgctttaaatgtggcaagcctggacattttgcaagagagtgtccttctgaaagtagtagagatggtggtggaaggttcagctcaaaggatgataggtacagttcgaaggacgataggtatggtgcaaaagatgataggtatggtgcaaaggaggataggtatggtgcaaaggatgataggtacagctccaaggatgataggtacagctccaaggatgataggtatggtagtagggatggtggaggtagtcgctatggacctgatcgcagtggtgaacgcgctggaggacgcagccgggatggtggcagccgtggagctccaggaggtgagaggcacagtcgtgctccatatgaccgccccagagctggtggtttccactag

SEQ ID NO: 2859 - DNA, 3549 bp, Arabidopsis thaliana
  Clone ID: AT_T3F24.C1.o1.tg
atggctggaactccgatcgcagtctttgacgaatcaggagacttctcattgtggaagacaaggatcatggctcatctcagcgtcatcggattgaaagacgttgtgattgggaagacgataacacctcttacagcagaagaagaggaagatcctgagaagaagatcgagctatgtcaaacagctcaagaagcctgggaaacattagatcgattgttcatgattcgatccttaccgcatagagtgtatactcaattgagtttctacactttcaagatgcaagaaaataaaaagattgatgagaacatagatgattttctcaagatcgttgcagatctgaatcatctacagattgaggtaactgatgaagttcaagcgatcctattgctgagttctttgcctgctaggtatgatggtcttgtagagactatgaagtatagtaacagcagagaaaagctgaggttagatgatgtgatggttggagcgagagataaagaaagggaattgtctcagaacaataggcctgtagcagaaggtcattatgctagaggtaggccagaaggaaagaacaacaatcaaggaaataagggaaagaataggtctcggtctaagtctgcagatggtaaaagagtttgttggatttgtggcaaggaaggccacttcaagaagcagtgttacaagtggttagaaagaaacaaatcaaagcaacaaggttcagatgttggagagtcgagtttggctaagtctagtgaaatatttgatcctgcaatggttataatggctactggagaaacactgttggttacaggcagagatgcagatgaatggtttctggatacaggatgttcgtttcacatgaccccaaggagagacttattcaaagatttcaaagaactgagttcaggttttgtcaagatgggcaatgatacatattctccggtgaaaggaattggaagtatcaagatcagaaacaatgatggaactcaagtaattctaactgatgtgagatacgtgcctaacatggcaagaaatctcatatcacttggaacattagaagacaaagggtgttggtttaaatctcaagatggagttttaaagattgttaaaggctgttccacaatcttaaaaggacaaaaaagagagactctttatatcctagagggattagcagaaaatggggaatcacattcctcagctgagttgaaagatgagacttctctgtggcatagtaggctcggtcacatgagtcaaaaaggaatggaaatcttggttaaaaaggattgtctacagagggaaactataaaggagttgaagttctgtgaagattgtgtgtatgggaagaaccatagagtgagctttgcaccagctcaacatgtcaccaaagagaagctagcttacatccattcagatttgtggggttcaccacacaatccagcttctctaggtaactgtcaatatttcatctcatttgtagatgattattcacgaaagaaagtcaagaaactaagaacagataatggtcttgagtactgcaatcactattttgagaagttctgcaaagatgaaggaattgtaaggcacaagacttgtgcttacacaccgcaacagaatgggattgcagagagacttaatagaaccatcatggataaagtcaggagtatgctgagtgaaagtggaatggataagaaattctgggcagaagcagcatccactgcagtatatctcatcaacagatcaccttctacagcactggattttgacttgccagaagaaaaatggactggtgctttaccagacctaaaaggtttaagaaagtttgggtgtttggtttacattcatgctgatcagggtaagctgaatccaagagcgaagaaagatgtgtttacaagctatcttgaaggagttaaaggatacaaagtttgggttttagaagaaaagaaatgtgttattagcaggaatgtgattttcagagaagagatcatgtacaaagacctgaagcatgattcacacacaagtatgattgaaaatgacttagaaaacatcagacttaaccctcctgttgttacttgtgatcatgaaattacagatcaaggtggagctactgtgacagatacatatcaagatgattctgcacaagacgctaactcacctgttataacacaaactcaagtctcaaatgaaaatcagtctaaatcagaagaagaagacttgagtgactatcagctagtcagagatagagctgtgaagataaacccgaggtataatgaatcaaacttggttggtttctcgtttttcacagaagatggagaacaggcagaaccaaattcatatcaggcagcactaagagatcctgaatgggataaatggaatgaagccatgaaagaagagatgatgtcaatgggaaagaatcagacattggatcttgtagaaaaaccagaaggtgtcaagatcataggctgcagatggatctttaccagaaagacaggaatacaaggagtggaagctccaagatataaagcacggttggtagcaaagggattcacacagaaagagggaattgattacacagaaatcttctcaccagttgtgaaacatgtctccataaggtacattgtgtcaatggtagcacattttgatatggaattgcagcagatggatgtaaaaactgcattcctacacggattcttagatgaagacatctacatggctcagcctgaaggttttgaggataagaaaaatcctgagaaggaagcttatgtgaagaaggtcctgcgttcaacacacatggatcaatctaagcctgtgtcaactccaattggagttcattttaagctgagagcagcaacagaagaagagtacaagaaccaatttgaaagaatgaggtttgtaccatatgctaacacagttggaagcataatgtattctatgataggcactcgaccggatcttgcttatccattagatgtgatcagtaggttcatgagtaaaccactgaaagatcactggcaagcggccaagtgggtcttgagatacatgaagggtacagaaacaaagaaattgtgctacatgaaacaagatgatttcctgttgagaggttattgtgactcagattatggaagtaactttgatactcggagatcgatatcaggttatgtgtttacaataggtggaaacaccattatctggaagtctaagctgcagaaagtggtagctctttccacaaccgaatccgagtatatggcacttacagaagcagtcaaagaagccttgtggcttaaaggacttgcgaatgagcttggttttccacagaaagatgtggaggttcactgtgattctcagagtgttatcgccttagcaaagaactcagtgcatcatgagaacaccaagcatatagacatcatgttacacttcgtgagagatgtcataactgaagggaagattaggctggtgaaaattgcaagtgaatgcaatacagcagatatcttcacaaaagtgttactagttaacaaacttgaaggagcactcaacatgctccgagtcagtagtcactga

SEQ ID NO: 2860 - DNA, 4008 bp, Arabidopsis thaliana
  Clone ID: AT_F9B22.C1.o4.tg
atggctcatctcagcgtcattggtttgaaagacgttgtgcttgggaccactccgaaacctctaaccgaggaagaagaagaagatccagagaaacgtaagaagcgagatgcggatgaagtagcaaggctcgagcgctgtgacaaggcgaagaatgtgatttttctgaatgttgcagataaggtcttgagaaagattgagctatgtaaaaccgcagcagaagcttgggaaacgttggatcgactattcatgattcgatctttaccgcatagagtatatactcaattgagtttctatacattcaagatgcaagaaaataagaagatcgatgagaatattgatgattttctcaagatcgttgcagatcttaaccatcttcagattgatgtaactgatgaggttcaagcgatattgttgttgagttctttgcctgcaagatatgatggtttggttgaaactatgaagtacagtaatagcagagaaaagcttagactcgatgatgtgatggttgcagcaagagataaagagagagaattgtctcagaacaatagaccagttgtagaaggtcattttgctagaggaagaccagatggtaagaacaataaccaagggaataaaggcaagaataggtcaaggtctaagtcagcagatggtaagagagtatgttggatctgtggcaaagaaggacacttcaagaagcaatgttataagtggatagaaaggaacaagtcaaaacagcagggttcagataatggagagtctagtttggctaagtccactgaagcttttaatcctgctatggttctactggctactgatgaaacgttggtggtgacagatagcattgcaaatgagtgggttcttgatactggatgctcgttccacatgactccaaggaaagactggtttaaagattttaaagagttgagttcaggttatgtcaagatgggaaacgatacttactctccggttaagggaattggcagtatcaagattagaaactctgatggatctcaagtgattcttactgatgtgagatacatgcccaatatgactaggaatctcatttctcttggtacactagaagatagaggatgctggttcaagtctcaggatggcattctgaagattgtaaaaggttgctctactatcttaaaaggtcagaaaagagatactctatacatactagatggtgtgactgaagaaggagaatcacattcttctgcagaagttaaagatgagactgccttatggcacagtagactcggtcacatgagtcagaaaggaatggaaattttggttaaaaagggatgcctgagaagggaagtgattaaagaacttgagttctgtgaagattgtgtgtatggtaaacaacacagagtcagttttgctcctgcacaacatgttactaaagaaaaattggcatacgtccattcagatttgtggggctcaccacataatcctgcatcacttgggaacagtcaatacttcatctcttttgttgatgattactcaagaaaagtttggatctatttcctaagaaagaaggatgaagcatttgagaagtttgttgaatggaaaaagatggtggaaaaccaatcagacagaaaggtcaagaagctaagaacagataatggtctagaatactgcaatcactactttgaaaagttttgcaaagaagaaggaatagtgaggcataagacttgtgcttacacacctcagcagaatgggattgcagagaggttaaatcgaacaataatggataaagtgaggagtatgttgagtaggagtggtatggagaagaagttctgggctgaggcagcctccacagcagtttacctcatcaacaggtcaccctctacagcaataaacttcgatttaccagaagaaaagtggactggagctcttccggatctaagttcactaagaaagtttggatgtttagcatatattcatgcagaccaaggaaagttaaacccgagatccaagaaagggatcttcaccagctatcctgagggagttaaaggatataaagtctgggttttagaagataagaaatgtgtgataagcagaaatgttattttcagagaacaggtgatgtttaaagacttgaaaggggattcacagaacactataagtgaaagtgacttagaggatttaagagttaacccggatatgaatgatcaagagtttacagatcaaggtggagcaacccaagataactcaaatccaagtgaagcaactacaagtcataatccagtccttaactcacctacacacagtcaagacgaagaatcagaagaagaagattctgatgcagtagaagatctgagtacttatcagttggtcagagacagggttcgcagaaccattaaagcaaatccaaagtataatgagtcgaacatggttggctttgcttattactcagaagatgatggtaagccagaaccaaaatcttaccaggaagctcttttggatcctgattgggaaaagtggaatgcagctatgaaagaagagatggtgtcgatgagtaaaaatcacacctgggatcttgtaacaaagcctgaaaaggttaaattgattggttgtagatgggtgttcactagaaaggctggaatacctggagttgaggcaccaagatttatagccagattggtagctaaaggctttacacagaaagaaggagttgattataatgaaatcttctcacctgttgttaagcatgtgtctatcaggtatctcttgtcaatggtagtacactacaacatggagctgcaacagatggatgtcaaaacggcattcttacatggatttctagaagaagagatctacatggctcaaccggagggatttgaaatcaagagaggatcaaataaggtatgtttactgaaacgatctctctatggccttaaacaatcacctaggcagtggaatctccggtttgatgaattcatgagaggaattaagtacactaggagtgcttatgatagttgtgtgtacttcaagaaatgcaatggtgatacatacatttacttacttttgtacgtggatgatatgttgatagcctcagctaacaagtctgaggttaatgagctaaaacagttattaagcagagaatttgaaatgaaagatttaggagatgctaagaagattttgggaatggagatttctcgagatcgtgatgctggtttgttgactttgtcacaagaaggctatgtaaaaaaggtcctgagatcatttcagatggacaatgctaagccggtttcaacaccattgggaattcatttcaagctcaaagctgctacagataaagagtatgaggaacagtttgaaagaatgaagattgttccttatgcaaatacaattgggagtatcatgtattctatgataggcactagaccggatcttgcttattcattaggtgtgataagtaggtttatgagcaaacctcttaaagatcactggcaagcggtaaagtgggtcttgagatacatgagaggtactgaaaagaagaaattatgtttcaggaagcaggaagactttctgctaagagggtactgtgattcagattatggcagcaactttgataccaggagatcaataactggttatgtgttcactgtgggaggtaacacaattagctggaagtcaaaattgcagaaggtcgtggctatttcatcgacggaagctgagtacatggcccttactgaggcagtaaaagaagcactgtggttaaaaggttttgctgcagagcttggacattcacaggattatgtggaagttcacagtgattcacaaagtgctataacattagcgaagaactctgtgcatcacgaaaggacaaagcatattgatatcaggttgcatttcatcagagatatcatatgtgcaggtttaataaaggtggtgaagattgcaacagaatgcaatcctgctaatattttcaccaaaactgttccactggctaagtttgaaggagcattgaatatgctccgagtcactgaaaactga

SEQ ID NO: 2861 - DNA, 750 bp, Arabidopsis thaliana
  Clone ID: AT_F8A5.C1.o17.tg
atggtggggagagatactgggcgtccacgtggttttgggtttattacattcactgatcgcagaggagctgatgatgcaattaagcacatgcatggaagggagttgggcaataaggtcatctccgtgaacaaagctgagcccaaagttggtggagaagatgtagaccaattaaagaaaggtggaggctattcatctcgagggaagggaaccgaggatgagtgctttaaatgcagacgccctggtcattgggctcgagattgcccatcaactggtgacgatcgagaacggttcagagttccccttgcgatgcgctctcgtattggagacatagatggacaccgagatcgctatggagatcgtgatctggagagggagcgggagcgggagcgtgagtttgaccgctacatggatggacgccgtgaccgagatgggggacgatatagctacagggaccgcttcgacagtggagacaagtatgagcctcgtgatcactatccatttgagagatacgcaccaccaggagaccgttttgtgagtgataggtatgggatgcctgaacatcatcttgagaatgaatatcgcgggagagagagaagctatgacagggacagatacgcaagggatacaagtgacagatatggagatatgggaccgatacgcgatgagggaagaccctacagaagcagaccaggtccttatgaccgtcctagccgtcctggaggcagaccttcatcatatgaacgttggtag

SEQ ID NO: 2862 - DNA, 933 bp, Arabidopsis thaliana
  Clone ID: AT_T19N18.C1.o10.tg
atggctgcaaaagaaggtagtaggatttttgtcggtggtttatcgccggaagtgacagatagagaccttgaaagagcttttagccgcttcggagacattctcgattgtcagatcatgctggaaagagatactggtcgttcacgtggattcgggtttatcacttttgctgatcgccgcgctatggatgagtccatcagagagatgcatggaagggactttggtgatcgggtcatctcagtgaacagagctgaaccaaaactggggcgagatgatggagaaagtcatggctctagaggtggcagagacagtggctactcgattgctggaaaaggaagctttggtggaggtggaggtggaggtgggcgtgttggtgaagatgaatgcttcaagtgtggacgggttgggcactgggcccgtgattgtccttctgctggtggtggtcgtggaggacctgttggtggtttttcttcacgtgctagtgcgtatggaggatctgatggacgtgttgaccgctatgctgaccgtgaccgctatgtggaccgcgaacgatacatagatgatcgatacgacggtgctgcacgctatggtgctagagacaggtttgacagcagagaagcctacataccccgtgatcgatacgccagtgacaggtatgcagccccggctgatcggtttgcaggtggtgatagatacagccgtggatcagaccgttatcctccagggagctatgacaaagctcggtcctttgagagagacatagccccgagtgcaggcagtgacaggtacggtggtggtagagctggtggtcccatccgtggaggaggagaggagggaagagggtttagaagcagagccggtgctccttatgagagaccgagcagaagtggtggtggtggagcttatccgtcgtcgtccacttttgaccgttattaa

SEQ ID NO: 2863 - DNA, 4071 bp, Arabidopsis thaliana
  Clone ID: AT_F9A16.C1.o8.tg
atgtctacggctaggatagaggttgagaagtttgatggtcgtggtgattacacgatgtggaaagagaagctgttggctcatatggatatattgggtctaaatactgctctcaaggagtcggagagcaccggtgagaagaaatcagttctggatgaatctgatgaagactatgaggaaaagcttgaaaagttcgaagctttagaagagaagaagaagaaggctaggagcgccattgttcttagcgtcacagatagggttctaaggaagataaagaaagaatcgacagctgctgctatgttgttagccttggacaagctatacatgtcgaaagctcttccaaacaggatctatccgaagcagaagctatacagcttcaagatgtctgaaaatctgtcggttgaaggtaacattgatgagtttcttcaaattattacagatttagagaacatgaatgttattatctcggatgaggatcaagctatcttactgctaactgcacttccaaaggcatttgatcagctgaaagatactttgaaatatagctctggtaagtctatattgactctagatgaggttgctgcagctatttactcaaaagaattggagttaggctcagtgaagaaaagtatcaaggttcaggctgagggtctttatgttaaagacaagaatgagaataaagggaagggtgaacaaaagggaaagggtaaaggaaagaagggcaagtccaagaagaaaccagggtgttggacttgtggtgaagaaggccacttcagatcttcttgtcctaaccagaacaaacctcagttcaagcagagtcaagtagtgaagggagagtcctcaggaggtaaaggaaatctggctgaagcagctggatattacgtgtctgaagctttgtcatcaactgaggtccatttagaagatgaatggatattagacacgggttgcagctatcacatgacctataaaagggaatggtttcatgagttcaatgaggatgcaggcgggtcagttagaatgggaaacaagacagtgtctcgggtcagaggtgttggaaccatcagagtcaagaacagtgatggtttaactatcgttctcactaatgtgagatacattcctgacatggacaggaatctgctgtcattgggaacttttgagaaagctggttacaagtttgaatcagaagatgggatattgagaattaaagctggaaatcaagtgttattgactggaagaaggtatgacacgctttatttgcttaattggaaacctgtggcaagtgaatcacttgcagtagttaagagagcagatgatacagtcttgtggcatcagaggctatgtcacatgagtcaaaagaacatggaaattctagttagaaaggggtttctagataagaaaaaggtatcaagcttagatgtatgtgaagactgcatctatggtaaagccaagaggaagagtttcagtctggcacaccatgatactaaagagaagcttgagtacatccactctgacttgtggggagctccatttgttccgctctcactagggaagtgtcaatacttcatgtccattattgacgactttaccagaaaagtatgggtttattttatgaaaactaaggatgaagcattcgaaaagtttgttgaatgggtcaatctggtggagaatcagactgataggagagtgaagactctcagaacagacaatggtctcgaattctgtaacaagttgtttgatggcttctgtgaatcaatagggattcataggcatagaacttgtgcgtatacaccccaacagaacggtgttgcagagcgcatgaacaggacgatcatggagaaagtaaggagtatgctgagtgattcaggtctacctaagaggttttgggcggaggcaactcacacaacagtgttacttatcaacaagactccctcttcagctctaaattttgagattcctgacaagaagtggtctggaaatcctccagtttacagctatctgagaagatatggctgtgttgcgtttgttcacacagatgatgggaaactggaacctagagctaagaaaggagtgcttattggttatcctgttggagtaaaagggtacaaggtgtggatacttgatgagagaaagtgtgtggttagtagaaacatcatctttcaagagaatgctgtgtataaagatctgatgcagagacaagaaaacgtttctacagaagaagatgatcaaacaggatcttatctggagtttgatcttgaagcagaaagagatgttatctcaggtggagaccaagagatggttaacactatacctgcaccagaaagtccggttgtctctacccctacaactcaagacactaatgatgatgaagattctgatgtaaatcagtctcctttgagttatcatttagtaagggatagagacaaaagagagataagagccccaagacgtttcgatgatgaagattactatgctgaagcattgtacacaactgaagacggtgaagcagttgaacctgagaattaccgaaaggcaaagttagatgcaaactttgacaagtggaaactagctatggacgaagagatcgattctcaagagaagaacaacacatggacgattgttactagacctgagaatcagaggatcattggttgcagatggatttttaagtacaaacttgggattcttggagtagaagaaccaaggttcaaagcaagacttgttgcgaagggttatgcacaaaaggagggcattgactaccatgagatctttgctcctgtggtaaagcatgtatctataagggtgttgctttcgatagtagctcaagaagacttagagctggagcagttagacgtgaaaactgccttccttcatggggagcttaaagagaagatctacatgtcacctccagagggatatgagtcaatgttcaaagccaatgaggtatgtcttcttaataaagctctatatggactgaagcaggcacctaaacagtggaatgagaagtttgacaacttcatgaaggaaatctgttttgtgaaaagtgcttatgacagttgcgcttatacaaaggtgttgcctgatggttcagtgatgtatcttctcatttacgtggatgatatactggtagcatctaagaacaaagaagctattacagccttgaaggctaatttgggtatgcgttttgagatgaaggatctaggagctgctaagaagattttgggtatggaaatcatcagagacaggacattgggtgttttatggctgtctcaagagggttacttgaataagattcttgaaacctacaatatggctgaagcaaagcctgcaatgactccactgggagctcatttcaagttccaagctgcaacagaacagaagctgatcagagatgaagactttatgaagtctgtcccctactcaagtgcagtggggagcattatgtatgccatgcttggcacacgtcctgatctagcttatccagtgggtatcattagccgttttatgagtcaacctatcaaggagcattggcttggagtaaaatgggtgctaagatacattaaaggtactcttaaaacaagactgtgttacaagaaaagctcaagtttcagtattgtgggctactgtgatgcagactatgctgcagaccttgacaagagaagatcaatcactggtttagtgtttacacttggtggaaacacaataagctggaagtcaggcttgcaacgagttgttgctcagtcaacaactgaatcagagtacatgtcactcacggaggctgttaaagaagcaatttggttgaagggcttacttaaagacttcggttatgaacagaagagtgttgagatcttctgtgactcacagagtgctattgcactctcgaagaacaatgtgcatcacgagagaacgaagcacattgatgttaagtaccatttcatcagagaaatcatttcagatggtactgtggaggtgttgaagatatctactgagaagaatccggcagatatattcaccaaggtattggctgtgagcaagtttcaggctgctttgaacttgctccgagtcaagtctgagtaa

SEQ ID NO: 2864 - DNA, 3693 bp, Arabidopsis thaliana
  Clone ID: AT_F7L13.C1.o40.tg
atgtcgtcagcaagggtagagatggagaagtttgatgggcatggagactacacattgtggaaggagaagctgatggctcacatggatctgttgggtttaacggtggctctcagggaaacacagtcggtctcagatcctctagaatctgaggaagaaggaaaagaatctgaaaaaggagataaggaagcactcatggaagagaagagacagaaagcgagaagcaccattgttttaagtgtctcagatcaagttttgcggaagagtaagaaagagaagactgcaccttctatgttggaagccctagacaaactgtacatgtctaaggcacttccaaaccgcatttatctgaaacagaagctttatagctacaagatgcaggagaacttgtctgtagaaggaaacatagacgagtttctacgtctcatagctgatctggaaaacacaaatgtgttggtttcagatgaagaccaagctattctgctactgatgtctttaccaaagcagtttgatcaactgaaggatactctaaagtatggctcagggagaacaacactatccgtcgacgaagttgttgcagccatttactcaaaggagctagagttaggctcaaataagaagagtataagaggacaagcagagggcctgtatgtcaaagacaaaccagagacaagaggcatgtcagagcagaaagagaaagggaacaaaggacggtcaagatctagatctaaaggctggaaaggatgttggatctgcggtgaagaaggtcacttcaagacctcatgtcccaacaaagggaagcagcagaacaagggaaaagaccaagcaagcggtagtaaaggcgaagctgcaacgatcaaaggaaacacatccgaaggttcaggctattatgtgtcagaagcattacattcaactgatgtaaatctggggaatgaatgggtcatggacacgggttgcaactatcatatgactcataagaaggaatggttcgaggagctgagtgaagacgctggagggacagtgaggatgggaaacaaatcaacctcaaagtttcgtgtaaagtacattcctgacatggatcgtaatttactttctatgggaactctagaagaacatggttatagttttgagtcaaagaatggagtcttagtggtgaaagagggaactaggactttattgataggcagcagacatgaaaagctttacttactccaaggaaagcctgaggttagtcattctatgactgttgaaaggagaaatgatgatacagttctgtggcacagaagattaggccatataagtcagaaaaatatggatattctggtcaagaaaggatacttagatggaaagaaagtttctaagttagagttgtgcgaagactgtatttatggtaaagctaggaggctgagtttcgttgtggctacacataacactgaagacaagttgaattatgttcattctgatttgtggggagcaccatcggtccctctatccttaggaaaatgtcagtatttcatctcgttcatagatgtttactcaagaaaaacgtgggtttattttctgaaacacaaggatgaagcttttgggacctttgctgaatggagtgttatggtagagaaccaaacaggaagaaagatcaaaattctgaggatagacaacggtctggagttttgtaatcagcagtttaatgatttctgcaaggagaagggtattgtgaggcatcagacatgtgcttacacacctcaacaaaacggcgttgcagagaggatgaatcacacaatcatggaaaaagtcagaagaatgttaagttattctggcttacctaagacgttttgggcagaagcaactaacactgtagtgactctaatcaacaaaactccctcatctgcagtcaactttgagatttctgacaagagatggtcaggtaagtctcctgtttataactacttaaaaaggtttggttgtgtggcttttacttatgcagatgaaggaaagctagtacctagagccaagaaaggagtgttcttaggctatctcagtggagagaaagggtacaaggtctggttgttagaagaaagaaagtgcagtgttagtagaaatgtgacatttcaagagaatgcagtctaccgagatgtgatgcagaagaacaaagactctgaggaagtggacacatcaagcagagttagaagagaaatcagagctccaaaacgttttgatgtggagggttattacagtgagtttactgatgatgaagaagaatcatttaatgttgaagccttgatggactctctgttgaagaatcacacctggactgtagtaaagaagcctgttggagaaagagtgataggctgcaaatggattttcaagcgtaagcctggaactcctggaattgaacaacctagattcaaggctaggttagtttcaaaagggtatgcacaaagagaaggaatagactacacagatatcttctctccagtggtaaagcacgtttcaatacggatattgctggctattgttgcagaggagaattatgagcttgaacagctagacgtcaagactgcttttcttcatggagatctagaagaaaagattttcatggaagcaccagaaggttatgaaagtcagttcaagcaaggagaagtgtgtctgttaaacaagaccatgtatggtctaaagcaatcaccaagaagatggaatcaaaagtttgatagttacatgctggaaatcggctttgagagaagccctcgtaataagtgtgcatacattaaatcacttgaggatggctcaaaggtctatctacttatctatgtcgatgacatgttggtggctgctagagatatgcaggtcatttctgagttaaagcagaaactcagtgagaagtttgaaatgaaggatctcggagctgctaagaggatacttggcatggagatctcaagagacagagttaagggaactctcacactgtcacaagaagattacttgagcaaggttctggaaacatacaacgtggatcaatgcaagtttgtggtaacacctctcggtgctcacctaaagatgcatgcggcaacagaacaacaactgctcagtgatgaagagtacatgaagtcagtgccttattcaaacgcagtaggaagcattatgtactctatgatcgatacaagaccagatttggcttattgtgttggcatcatcagtcggtttatgagcaaaccaaagggagcagacttaaccctcagagggtattgtgactccgactatgctgcaaacctggagaacaggcgatcaataagcggaatggtattcacacttggtgggagcaccataaacttgagatcatgtctgcaaaaagtagtggtaatgtcatccactaaagccgggtatatgtctctcactgaagcagtaaaggaggctatatggcttaaaggtttgttacaggactttggctatgaacagaagacggtggagattttctgtgattctcaaagcgccatagccctgtcaaagaacaatgtgcaccatgacaggacaaagcacattgacatcaaataccacaagatccgcgaggtcattgcagatggagtggtagaagtgaagaagatatgcacactggtgaattcagctgatatcttcacaaaggttgtacccgttagcaagttcaagacagctttgcactcgctacgagtaaagactgagtaa

SEQ ID NO: 2865 - DNA, 765 bp, Arabidopsis thaliana
  Clone ID: AT_T30G6.C1.o10.tg
atgattaagctacccaatccgatttctagggtttgtgatcccttaatcatgccgagacataatgatgatgaagcagaagtatgtttaagatgtggaggatttggacatgacatgaccttgtgcaagtatgagtactctcatgaagatttgaagaatatcaaatgctatgtctgtaatagcttagggcatttatgttgtattgaacctggtcatacacagtcatggactgtatcttgctacagatgtggtcaactaggtcatactggactggcatgtggtagacactacgatgattcggttagtccatcatgctttatctgtgggagagaagggcattttgagcatcagtgccataattctttcagtgtatgctttccagaagacagtagtgaagatgagtgtcaaggccctgattcttcgagcgtacgctttcaagaaaacactagggaagaagaagaagggcattttgagcatcagtgccctgattcttccagtgtatgctttcaagaaatcagtagggaagaagggtttatctcactgaattcatcgagcaaaagcacttcaaagggcagagagactcgccgtttatgctacgaatgtaaaggaaaaggacatattgctcgtgattgccccaattcctcacaggtagtctctatctctctttctacattttgtgctttgagctcttcagttctttcctttctatcatgttattattcacgtataaattttctttgtttttttcaggataaatatggcatctaa

SEQ ID NO: 2866 - DNA, 855 bp, Arabidopsis thaliana
  Clone ID: AT_F4P12.C1.o200.tg
atgcctcgctatgatgatcgctatggaaacactcgcctctatgttggtcgcttatcatctagaactcgtaccagagaccttgagcgtctctttagcagatacggaagagtacgagatgtggatatgaagcgtgattatgcctttgttgaatttagtgatcctcgtgatgctgatgacgcaagatattacttggatggacgggatttcgatggaagtcgcatcactgtggaggcatcaagaggggctcctcgtggttcgcgggacaatggtagcagaggcccacctcctggttctggtcgctgttttaattgtggtgtcgatggccactgggcccgagactgcacagcaggagactggaagaataaatgttaccgctgtggtgaaagaggacacattgagagaaactgcaaaaacagtcctagtccaaagaaggccaggcagggtggaagctattccaggtcaccagtcaaatcccgctcccctcgtcgccgaaggagcccaagccgtagccgtagttacagtcgaggtcgcagctacagtcgatcgcgatccccagtgagaagagagaaaagcgtggaggacagatcacgcagtcctaaggcaatggagcgatctgtatctcccaaaggtagggaccaaagcctgagtccagaccgaaaagtgatagatgcaagcccaaagcgtggatcagactatgatggtagcccaaaagagaatggtaatggcaggaactctgcgagtcccattgttggaggtggtgaaagtcctgttggacttaatggtcaagacaggagcccgattgatgatgaggctgagcttagccgtccttcccctaaaggcagtgagtcaccttga

SEQ ID NO: 2867 - DNA, 750 bp, Arabidopsis thaliana
  Clone ID: AT_F3G5.C1.o13.tg
atgaagcgagattatgctttcgttgaatttggtgatccccgtgatgctgatgatgcaagacattacctggacggacgagactttgatggaagtcgcatcactgtggagttttcacgaggggcacctcgtggttctcgggattttgatagcagaggcccaccacctggagctggtcgctgttttaactgtggtgtagatggtcattgggctcgtgactgcacagcaggggactggaagaacaagtgttaccgttgtggagagagaggacacattgagagaaactgcaaaaacagccccaagaagcttaggcgcagtggaagctactccaggtcacctgtaagatcccgttctcctcgtcgtagaagaagcccaagccggagtcttagccgtagccgaagctacagccgatcacgatccccggtgagaagaagagagaggagtgtggaggagagatcacgcagtccaaagcggatggatgactctctatcgccaagagccagagatcgtagtccggttcttgatgatgaaggcagcccaaagatcatagacgggagcccaccaccatcaccaaagcttcaaaaggaagtcggatctgaccgtgacggtggtagcccccaagacaatggcagaaactctgttgtcagtcctgttgtaggagccggtggtgacagttcgaaagaggaccggagccctgttgatgatgattacgagccaaaccgcacttcccctagaggaagtgagtctccttaa

SEQ ID NO: 2868 - DNA, 2844 bp, Arabidopsis thaliana
  Clone ID: AT_F20D21.C1.o30.tg
atgggagtaccggcgttctacagatggctcgctgaccgatacccgaagtcaattagtgacgtcgttgaagaagaacctaccgatggaggtcgtggtgaccttattcctgttgatatcaccagacctaaccctaacggcttcgaatttgataatttgtatctcgatatgaatggtatcattcatccttgtttccatcctgaaggaaagcctgcacctgccacgtacgatgatgtatttaaatcaatgtttgagtacattgaccatctttttactttagtgcgtccgaggaagattctttatttggctatagatggagttgcgccgagagcaaagatgaatcagcagcgttctcgacgtttcagagctgcaaaggacgcagcagaggctgaagctgaggaagagaggttgagaaaagattttgagatggagggccaaatcttgtccgctaaagagaaagctgaaacctgtgattcaaatgtcattactcctgggaccccttttatggctatactgtcagtcgctcttcagtattacatccaatctaggttaaaccataaccctggctggagatatgttaaggtaattctttctgattcaaatgttccgggagaaggagaacacaagataatgtcatacattcgtctccaacgtaatcttcctggttttgatccaaatacacggcattgtctatatggtctggatgcagatttgataatgctctccttagctacacatgaagttcacttttccatcttaagagaggttatcacttaccctgggcagcaagagaaatgctttgtgtgtggacaaactggccactttgcttcagattgccctggaaaatcaggtagcaataatgcagcagctgatattccaatccacaagaaaaaatatcagttcctgaacatttgggtgttgcgagaatatctgcaatatgaattggccattccagatcctccttttatgatcaactttgagagaataatagacgactttgtattcctttgcttttttgttggtaatgacttcctacctcatatgcctacactggaaattcgagagggggctataaacttgctgatgcatgtttacagaaaggagtttacagctatgggaggctatctaacagattctggtgaggttttactagatagggtagagcatttcattcaagctgtcgctgtaaatgaagataaaatatttcagaaaagaacgcggataaaacagtcaatggataacaatgaagaaatgaagcaaagatctagaagggacccatctgaggtaccacctgaaccgatagacgataagattaaattaggagaaccaggctacaaggagaggtattatgctgagaaatttagtacgaccaatccagaggaaactgagcaaatcaaacaagacatggtactgaaatatgttgaaggtttgtgctgggtttgccggtactactaccaaggtgtatgctcttggcaatggttttacccataccattatgctccatttgcttcagatcttaagaatctacctgatttagaaatcacattttttattggagagccctttaaaccttttgaccagttaatgggaaccctgccggctgcaagctcaaatgcgctgcctggagaataccggaagttgatgactgatccctcatccccgatacttaaattttaccctgctgattttgagcttgacatgaatggaaagcgcttcgcctggcagggtattgcaaaacttcctttcattgaggagaaattattgttagctgctacaaggaagcttgaagaaactctaacggtggaagaacaacaacgcaacagtgtgatgcttgatttgttatacgtacaccccgctcatccactgggccagcggattctgcagtactatcatttctaccagcacatgccaccacatgaatgtcttccatggatgattgacccgaattctagccaaggaatgaacggttttctttggtttagtgaaaggaatggtttccaaactagagtggattcccctgtcaatggtttgccatgcattgagcagaaccgagccttaaatgttacatacctgtgtcctgccaaacactctcatatctcagaaccacccagaggagcgatcattccggacaagatcttgacgtcagtagatataaagccatttcctcctttatggcatgaagacaatagcaaccgacgccgacaagcccgagataggccgcaagtggttggagctatagcagggccttctctgggagaagcagctcatcgtctgatcaaaaacacccttaacatgaaatcctctactggtgcggcttcgggattaattgacccaaacggatactaccgaaatgtaccgggtaattattcttatggtggagtcaatagaccaagagcaccgggtccgtctccttaccggaaagcttatgacgatgactcgagctattactatggaaagtataacaatagcacacagggaacgtttaacaatggtccaagatatccttatccatcaaatgggtcacaagactataaccggaactacaactccaagatagtagcagaacagcacaaccgtggtggacttggagctggaatgtctggtttatcgatagaagataacggcagaagcaaacaattgtattcaagttatacagaagctgctaatgcaaatttgaacccgttgccatcaccccccacccaatggatcggtacacagccaggtggtaattttgtcggtggatactatagggatggagttgggtacagtgaaacaaatggaaaatcggtaaagaaagtaatttaccaggccaagacacaaccaagtcatcgaggtgcaaacttgtga

SEQ ID NO: 2869 - DNA, 591 bp, Arabidopsis thaliana
  Clone ID: AT_F25P17.C1.o11.tg
atgtcgcgtgtgtatgttggtaatttggatccgcgagttactgaacgtgaactcgaggatgagtttcgttcctttggtgtgatcaggagtgtctgggttgctagaagacctcctggttacgcttttcttgattttgaagattcaagagatgcccgtgacgccatccgtgaagtagatggcaagaatggatggagggtagagcagtctcataaccgtggtggtggtggaggtcgtggtggtggtcgtggaggaggtgatggtggtcgtggacgtggtggttctgatttgaagtgctatgagtgtggtgagtctggtcactttgcacgtgaatgtcgttctcgtggtggttctggtggtaggcgtcgtagccgcagccgtagtcgcagtcctcctagatacagaaagagtcctacctatggaggacgaagaagttacagccctcgtgctagatctcctcctcctccaagacgtcgtagtccttctcctcgtggtcgcaactacagtaggtcaccaccaccttatagagcacgtgacgaggtgccatatgctaatggaaatggtctgaaagatgtgcgcagaagccggagctga

SEQ ID NO: 2870 - DNA, 4029 bp, Arabidopsis thaliana
  Clone ID: AT_MIK22.C1.o13.tg
atgtcttcgggcagagcagaggtggagaagttcgacggagatggggattacatcctgtggaaagaaaagttactggctcatatggagatgttgggacttttggagggtctcggggaagaagaggaagcagtggttgaagattctaccactgagattagtgatggaggaaaccaagacccagaaactgcaacttctaaactggaagacaagatcctcaaagaaaaaagaggaaaagccagatctaccatcatcttgagcctgggaaacaatgttctgagaaaggtcatcaaacaaaagacagcagcaggtatgataaaggtcctggatcagttatttatggcaaaatctcttccaaatcgcatttacttgaagcagaggctgtatggctacaagatgagtgagaatatgacgatggaggagaatgttaatgatttcttcaagttaatatcggacttggaaaacgtaaaggttgtagtcccagatgaagatcaagccatagtcttgctcatgtctttaccaagacagtttgatcaactgaaggagacactgaagtactgcaagactacacttcatctcgaagaaatcacaagtgccataaggtctaagatcttggagttgggagctagtggtaagcttctcaagaataactcagatgggttgtttgttcaagacagaggcagatcagaaaccagggggaaaggaccgaacaagaacaagagcagatctaagtcaaagggagcaggaaaaacgtgttggatctgtggcaaggagggtcatttcaagaagcaatgctatgtatggaaggagaggaacaagcaaggttccacatctgaaagaggagaggcttctactgtaactgctcgagtcactgatgcagctgcactagtagtttcaagagctttacttggctttgctgaagtcaccccagatacatggattctagacacagggtgttccttccatatgacctgtagaaaggattggatcatagacttcaaggagactgcaagcgggaaagtaaggatgggcaatgatacttattctgaagtgaaaggaattggggatgtcagaatcaagaatgaagatggatctactatcttgctcactgatgtcaggtacataccagaaatgtcaaagaacctcatctcacttggaactcttgaagataaaggctgctggttcgaatcgaagaaaggtattttgactatttttaagaatgatcttactgtactaactggaaagaaagagagtactttgtattttctccagggaacgacacttgcaggtgaagccaatgtcatagacaaagaaaaggatgaaacaagtttatggcacagcaggcttggtcacattggtgcaaaagggctgcaggttttggtcagtaaaggtcatctggataagaacattatgattagctttggagctgcaaagcatgtcacaaaagataaactcgactatgtgcattctgatctatggggatcaacgaatgtaccattctccattggtaagtgtcagtatttcatcactttcattgatgattttactaggagaacttggatctatttcattagaaccaaagatgaagctttcagcaagtttgtagaatggaaaacacagattgaaaaccaacaggacaagaagctcaagattctcataacagataatgggctggagttctgtaaccaggagtttgattcattctgcagaaaagaaggagttataaggcacaggacatgtgcatacacaccacagcagaatggtgttgctgaaaggatgaacaggaccatcatgaacaaggtcagatgcatgttaagtgaatcagggttggggaaacagttctgggcagaagcagcgtctactgccgtgttcctcatcaacaaaagcccaagctcctcaatagagtttgatattcctgaagagaagtggactggtcatccaccagattacaagatactcaagaagtttggatcagttgcttatattcattcagatcaaggaaagctgaatcctagagcaaagaaggggatttttctcggatatccagatggtgtaaagagattcaaagtgtggctgctagaagacaggaaatgtgtagtctctcgagacattgtttttcaagaaaatcagatgtacaaggaactgcagaagaatgatatgtctgaggaagacaaacagctcactgaagtagaaaggactctcatagagctaaagaatttgtctgcagatgatgaaaatcagagtgaaggaggagataattcaaaccaagaacaagcgtcaacaacaagatctgcaagtaaagacaaacaagtagaggaaactgattctgatgatgattgtctagagaactatctactggccagggatagaattcgaagacagatcagagctccacagagattcgttgaggaagatgacagccttgttgggtttgcattaacaatgacagaagatggagaagtttatgaaccagaaacctatgaagaagccatgagaagtccagaatgtgagaaatggaagcaagctaccatagaagaaatggactccatgaaaaagaatgacacatgggatgtcattgataagcctgaaggaaagagagttataggctgtaagtggatattcaagagaaaagcaggaattcccggagtagaaccaccaagatacaaagctaggcttgtcgccaaaggattctcacaaagagaaggcatagactatcaggagattttctcacctgtagtaaagcacgtgtcaatcaggtatcttttatccattgtggttcaatttgacatggaattagaacagcttgatgttaagactgcgtttttacatgggaatctggatgagtatatattgatgagtcagcctgaaggatatgaagatgaggacagcacagaaaaagtctgtttgctaaagaaatctctgtatgggctgaagcagtctccaagacagtggaatcagagatttgactcattcatgatcaactcaggttatcaaagaagcaagtataatccatgtgtctacacacagcaacttaatgatggatcgtacatctatctactgttgtatgtagatgatatgctcattgcatcacagaacaaagaccaaatccagaagttaaaagagtcactcaacagagaatttgagatgaaggatttagggcctgcaagaaagatactaggaatggaaatcacaagaaacagagaacaaggcattttggacctgtctcagagtgagtatgtggctggagtgttgagagcttttgggatggatcaaagtaaggtctctcagacgccacttggtgcacacttcaagttaagagccgcaaatgagaaaactcttgcaagagatgctgagtatatgaagttggttccctaccctaatgcaattggaagtatcatgtactctatgataggatcaaggccagacttggcatatcctgtgggggttgtaagcaggtttatgagtaaaccctcaaaagaacactggcaagctgttaagtgggtcatgaggtacatgaagggaacacaagatacctgtctaaggttcaagaaagatgacaaatttgaaatcagaggctactgcgattcagattatgcaactgatttagacaggaggagatcgattacaggatttgtattcacagctggtgggaatacaataagctggaagtcgggtttacagagagtggtggctctgtcaacaacagaagctgaatatatggcccttgcagaggcagttaaagaagccatttggctaagagggttagctgcagagatggggtttgaacaagatgcagtagaagttatgtgtgattcacagagtgccattgctttgtccaagaactcagtccaccatgagaggacaaagcatatagacgtgaggtatcacttcataagggagaagatagcagacggagagattcaggttgttaagatttcaacaacatggaatcctgcagacatcttcacaaaaacagttccagtgagtaagcttcaagaagcgctgaagctactcagggtctcaagtaactag

SEQ ID NO: 2871 - DNA, 1884 bp, Arabidopsis thaliana
  Clone ID: AT_T25N22.C1.o4.tg
atggaaccaacggatgttagtactggtacaggcaaggttttactgctagatactaagcggtatggatactggaaagtttgtatgacacaaatcattagaggccaagaagatgggttcaaaatcactaaaccaaaggcgaattggactgcagaagagaagcttcaatcaaagtttaatgcaagggctatgaaagctatcttcaatggtgttgatgaagacgagtttaagcttattcaagggtgcaagtcagcgaaacaagcgtgggacacgttacaaaaatcccatgagggaacttcgagtgtaaagagaacaagactggatcacattgctactcagtttgagtatctcaagatggaaccagatgaaaaaatagtgaagttcagttcaaagataagtgctcttgcgaatgaggctgaggtcatgggaaagacctataaagatcaaaaattagttaagaagctgttacgttgtttgccaccgaagtttgctgcccacaaagcagttatgagggttgcagggaatactgataaaatatcatttgttgatcttgtgggaatgctcaagttagaagaaatgaaagctgatcaggacaaagtcaaaccgtcgaagaatattgcatttaatgcagatcaaggctctgagcagtttcaggagattaaggatggaatggcactgctagcaaggaattttgggaaagctctaaaacgtgtagaaatagatggagagagatcacgtggaagattctccagatctgagaatgatgacttaagaaagaagaaggaaattcaatgctatgagtgtggtggttttggtcacattaaacccgagtgtccaatcaccaagagaaaagaaatgaaatgtcttaaatgcaaaggtgtgggtcacactaagtttgaatgtcctaacaagagcaaacttaaagagaaatctttgataagcttcagtgattcagaatctgatgatgaaggtgaagagctgttaaacttcgtggcgtttatggcaagttctgactcaagcaagtttatgagtgacacggattctgattgtgatgaggaattgaatcccaaggataaatacagagtgctatatgatagctgggtgcaactaagtaaggacaagctgaagctggtaaaggaaaagctaactctagaagcaaaacttgctaatgtgagcacagaggataagcagaaactgagtggaatcactgttgatggaaattcacaggactactatcaaaagaaacttgactgtcttcagaaagagtgtcacagggaaagagatagaactaaacttctggaaagagagttgaatgacaaatacaagcagatcaggatgctcaacaaagggttagaaagtctagacaagatcttggcaatgggcagaactgattctcaacaaaggggtttgggttatcaaggttatacaggaaagatcaaaaaggaagaaggaagagtcatcaactttgtcagtggtggttcaacaagtgaaactgtggtgagacaaagctatattgaaccgaagaaacaagtaaagtcacatgttgaaataaaaagagaatctgttgtgagaacaaggatggtgggtgtgatttgctgcgatcattgtggtaagagatttcatatgagagaacagtgttacaaattcaaagagaaagtcagaacgctgtggaatttagcaaagtgcttcattgagccatcgagattctgcactgtgtggattaagaagaaagatctatatggtgatatggaagctgaaaggtacaatcacaagttagaaagaatgtatgaagaagaggaaatgcattacgccagttgctgcaatcaggtcaacaaagaaatgcaagacgaggcccgcaaaaaagatgattcattcggatcaacatga

SEQ ID NO: 2872 - DNA, 786 bp, Arabidopsis thaliana
  Clone ID: AT_F13M14.C1.o33.tg
atgaagaagaggaagattcatcatagcgacgacgaagaggacgacactttctactatcgctattcctccgtcgcggcaccaccaccttcgaaccctaaacaccaaccttcttcctccgccaaatcatcagctcccggcggcggatctggcggcttagctccttcaaaatcaacactctacgtctccaatctcgatttctccctcaccaattccgacatccacactctattctccactttcggcaaggtcgcgagagtcactgttctcaaagatcgccacactcgccaatctcgtggcgtcgcgttcgtgctctacgtctctcgtgaagacgcggctaaagcggcgcgttctatggacgccaagattcttaatggtcggaaactgacggtttcgatcgccgctgataatggacgtgcgtcggagtttattaagaagagagtttacaaggataaatcgaggtgttacgagtgtggagacgaagggcatctttcgtacgagtgccctaaaaatcagttaggtccaagggagagaccaccgccgccgaagaaaagggggcggcggaaggaggaggaaggtgaggctgaggaaattagttggtctgcggcggcgccttcgttggctgtggcggaggaggaatttgaggaggagaattgggcttcggtggtggataatgaagctggagagaggttgagaaaaagagaagcagaggaagaagaagagaggaggatgaagagaaaggagaagaaagttagctactttagtgatgagagtgatgatgaagattag

SEQ ID NO: 2873 - DNA, 1656 bp, Arabidopsis thaliana
  Clone ID: AT_F22J12.C1.o30.tg
atgccgaggcagaataaagatgaaaaatttgtttttgatgacggagaagacgaagacagagaagatccagtagccattacagaagtcgacaacggcgaagaagaagatgatgatgaagctaatgaagatctaagcttgaagattttagagaaagcattatcgaggcgtgatgttgggaacaagcttgattctgatctctcctccgattctggtgtagttagtactgtgatggttaatggagtaaagtctaaggttaaaaagtctgagagtagtaagaagatgaagagaaataagcttgaagctgaccatgaaattcctattgtttggaatgaccaagatgaagagaaagtggtggaggagatagtaaaaggtgaaggagaggatgatgaggttgagagatctgatgaaccaaaaactgaagaaacagctagcaatttggttctgaaaaagcttcttcgtggagcaagatactttgaccctcctgatgctggttgggtgagttgttatagttgtggggagcaaggtcatacaagtttcaattgtccaactcctactaagcgtagaaagccttgctttatatgtgggagtttggaacatggtgcaaagcagtgttcaaagggacatgattgttatatatgcaaaaaaactggacatcgagctaaagattgtccggataagtacaaaaacgggtctaaaggagctgtatgtttaagatgtggagactttggacatgacatgattttgtgcaagtatgagtactctaaggaagatttgaaggatgtacaatgctatatctgtaaaagctttggccatctatgctgtgttgaacctggtaattcactgtcatgggctgtatcttgctacagatgtggtcaactgggtcatagtggactggcatgtggtagacactatgaagaaagcaacgaaaatgattctgccactccagaaaggctttttaacagtagggaagccagtgaatgctataggtgtggggaagaagggcatttcgcacgtgaatgtccgaattcgtcgagcataagcacttcacatggcagagagtcacaaactttatgctacagatgtaatggatcaggacatttcgctcgtgaatgccccaattcctcccaggtttctaagagagaccgtgaaacatctacaacatcacataaatctcgcaagaaaaacaaagagaactcagaacacgattctactccccatgagtccaatggaaagacaaagaagaagaagaagaagaaaacacataaagaagaacagccccagacttcaccaaggaaacgaaaacacagaggcggttggatcacagaggaaccggaagaagaatctttccaaagaggaaagatgagaaggccaaagtctcccattacaccatcgggttataacaggtcaccctctacacatattggtcataactatagatcgccaaaattcaattctggtgggcattacccgggttctcagtctagtaggcatcactcgggtccttcaccttcaaggtggcagccttctcatcagcatcatcatcatcatcagcatcttcatcatcatcatcagaatcacagttatgaacctgcaccaccaaggcatggaagagctaaccgctatagtgagtttgcagggaactatgaacggtggtag

SEQ ID NO: 2874 - DNA, 4071 bp, Arabidopsis thaliana
  Clone ID: AT_F28L22.C1.o3.tg
atggcgacgactacaactagagttgagataaaggtgtttaatggcgatcgagatttctcgctatggaagatccgtatccaagcacaacttggtgttttgggattaaaagatactctcactgatttctctttaacgaagacagttccgcttaccaaaagtgaagcaaaacaagaatcaggtgatggagaatcttcaggtactaaagaagtaccagatcctgtgaagatcgaacaatcggaacaagcaaagaacatcatcatcaatcatatctctgatgtagtactattgaaggtaaatcattatgctacaactgcagatctctgggctactctgaacaagaagtacatggagacttcattacctaatcggatttacacgcaattgaaattgtactcgttcaagatggttagcacgatgactattgatcagaacgttgatgagttcttgaggattgtggctgaattaggcagcttagagattcaagtggatgaggaagttcaagccatattgatcttgaattcgttaccagcgagtcatattcagcttaaacacacgctgaaatatggaaacaagactcttacggttcaagatgttacatcctcggctaagtctctggaaagagagctggcagaagcagttgacttagacaaaggacaagcagctgtgttgtatactacagagaggggaagacctcttgtgagaaacaatcagaaaggaggtcaaggtaaagggcgtagtcgctctaactcaaaaacaaaggtgccttgctggtattgcaagaaagaaggacatgtgaaaaaagactgttactctcgcaagaaaaagatggaatcagaaggtcagggtgaggctggtgttatcacagagaagctagtgttttctgaagcattgagtgtcaatgaacagatggtaaaagatttgtggatacttgactctggatgcacttcacatatgacttcaaggcgagactggttcattagtttccaagaaaaaggaaacactacaatccttcttggtgatgaccattctgtggaatctcagggtcaaggaacaatcaggatagatacacatgggggtactatcaaaatcctagagaatgtgaaatatgtccctcacctcagaaggaatttaatttccacaggcactcttgacaagctagggtacagacatgaaggtggtgaagggaaggtcagatatttcaagaataataagacagctctgcgtggaagtctgtcaaatggattgtatgttctggatggaagcacagtaatgtcagaactgtgtaatgctgagactgataaggtgaaaactgccctgtggcatagcagacttggacatatgagtatgaataacctgaaagtgttagcaggaaaaggacttattgacagaaaagaaataaatgagttggagttttgcgaacattgtgttatgggaaagtccaagaaggtcagttttaatgtggggaagcatacatcagaggatgcactgagctatgtgcatgcggatctctggggctctccaaatgtaaccccatcgatctcagggaaacaatatttcttgtccatcatcgatgataaaacaagaaaggtatggctgtatttccttaagtctaaagatgagacttttgataagttttgtgagtggaaaagcctagttgagaatcaggttaacaagaaagtgaagtgtctgagaacagacaatggtttagagttctgtaactctaggtttgattcttactgtaaagaacatggcattgagagacacaggacctgcacatacactcctcagcaaaatggagtagcagaaagaatgaataggactattatggaaaaagtaaggtgtttgttgaataagtcaggagtagaagaggtcttctgggctgaagcagctgccactgcagcatacttgataaatagatctcctgcctctgctattaaccacaatgtaccagaagagatgtggcttaataggaaacccggttacaagcacctcaggaaatttggatccattgcctatgtacatcaggatcagggaaaattgaaaccaagagctctaaaaggtttcttcctgggatatcctgcaggaaccaaaggctacaaggtttggttacttgaagaagaaaaatgtgtcatcagcagaaatgttgtgtttcaggaatcagtggtctacagagaccttaaagtaaaagaagatgacactgacaatctgaatcagaaagagactacatcgtcagaagttgagcagaataagtttgcagaggctagcgggtcaggtggagttattcaacttcagagtgacagtgagccgattacagaaggtgaacagagttctgattcagaagaagaggtggagtactctgagaaaacgcaggagactcccaaaaggacaggactgactacatataagcttgcaagggatagagtcaggagaaatatcaaccctccgactagattcacagaagaaagcagtgtgacatttgcattggttgttgtggaaaactgcattgtacaggaaccacaaagttatcaagaagctatggagagtcaggactgtgaaaaatgggacatggctacacatgatgaaatggattcattaatgaaaaatggaacctgggatcttgtggacaagcctaaagacagaaagattattggatgcaggtggctgtttaaattgaagtctggaattcctggtgtggaaccaacaaggtttaaggcacgtttggtagccaaaggctatactcaaagagaaggagtggactatcaggagatatttgcacctgtggttaaacatgtttcgataagaattctaatgtctttggtggttgataaggacttagaactcgaacaaatggatgttaagacgacgttcttgcatggtgacttggaagaagagttgtacatggagcaacctgaaggctttgtgtcagattcaagtgagaataaagtttgcaggctcaagaaatccttgtacggattaaagcaatctcctcggcagtggaacaagagatttgatcgttttatgtcaagtcaacagttcatcaggagtgaacatgatgcatgcgtctatgtcaagcatgtaagtgaacatgatttcatctacttactgctttatgttgatgatatgcttattgctggagctagcaaggctgagattaacagggttaaagaacagttaagtactgagtttgaaatgaaggatatgggaggtgctagtcggattcttggtattgacatttacagagacagaaaaggtggagttttgaagctgtctcaggaaatctacattagaaaggtactggacagatttaatatgagtggagctaaaatgactaacgcaccagttggtgctcatttcaagttagctgcagtaagggaggaagatgagtgtgttgacactgatgtagtcccatactcaagtgcagtggggagtatcatgtacgcgatgcttggtactcgtcctgatttagcttatgctatttgtctgatcagcagatacatgagcaaacctggtagtatgcactgggaagcagttaaatgggttatgaggtatttgaagggagctcaagacctgaacttggtctttacaaaagaaaaagacttcactgtaacaggatactgtgattctaattatgcagcagacctagacagaaggagatccataagtggatatgttttcactattggtggcaatacagtgagctggaaggcgagtctgcagccggtggtagctatgtctactacagaagcagagtacattgcactagcggaagctgctaaagaagcaatgtggattaaaggactgttacaagacatgggaatgcagcaggataaggtaaaaatctggtgtgattcacagtctgcaatttgtttgtctaagaacagtgtttatcacgaacggactaagcacatagatgtgaggttcaattacatcagagatgttgtagagtctggtgatgtggatgtgttgaagattcacacgtcgagaaatcctgtagatgcattaaccaagtgcattcctgtgaacaagttcaagtcagctttaggtgttctgaagctgatgaagtgggactga

SEQ ID NO: 2875 - DNA, 603 bp, Arabidopsis thaliana
  Clone ID: AT_T4C9.C1.o40.tg
atgggcgaaagcaagtctgttatggagaacgttgatgagtttcagtggttgattgatgaactaagtaatgctaaagtagagatatttgatgaagatcaggctatatatttgatgatttctttgccagaacagattgaaaagtttgatgggagaggtgattacattttggggaagacgaagatccttgctcgttttgagattcttgatgtgattgatgctttaaagattgaggaggatgagaacaaatctgttggaacagatgaaggtaagagtcattgtgtagctttgagtctagatctagaagagaagaagagaaaggcaatgagcatgattgttcagagcgtagaaaatcagaatctgcgaaagaaacttatgaaggagaagacagctgctggatataaagaaactgcagaggaacttcatgtgagacgcaggtctgttagtagagataggtcaaaatccaaaggagagaaaggggcttgctggatttgtggggaagatggccactacaaaaacgactgtccatctaggaactctgagaagccgaaggaacatgcttataaagcacaagaagcatctgttccaagaaggaataatgcttga

SEQ ID NO: 2876 - DNA, 1794 bp, Arabidopsis thaliana
  Clone ID: AT_T26I12.C1.o220.tg
atggtgctgtcgaacaagaagctgaagcagaggattcgacaagatttggctgaatcactatctgtctctgtatccgaaacaaatccacaatctcagtctctgaaattgctccttgattcatctagccacaaacccagattgtcgaagagagagaaacgaagaaattgcgaaactttcgctagagaagacgacgaaatcagagagaatgaagttgggaatggtgggtcaagcgagaagactgatacgaagattaaaaagaagagaaagagagacgatgctgtggaagtcgacgagttagaaggagatgaaggaactaaggaagagcaaaaaccccagaagaagaaaaataagaagaagaagaagaagagaaaggtaaacaaaacgccaaagaaggctgaggaaggcaatgtagaagagaaggtgaaggtagaagagattgaagttaatacagacaataaagaagaagatggggttgttcctaacaagttatatgttgggggtattccttatcagagtacagaagatgagattcgtagctactttagaagctgtggagtcatcattaaagttgattgcaagatgcgtcctgaagatggggctttcagtggtattgccttcatcacttttgacactgaagatggcgcaaaacgtgctttggcttttgatagagctgctatgggtgatcgatatttgacaatccagcaatacgtgaaaaccaccaccccttccattccaagaaggaaaacatcttctggtttcgctccagaaatggtggatggctataacagggtatacattgggaatttagcctgggacacaacagagcgtgacatacggaagctcttctctgactgcgtaataaactctgtgcggttgggtaaaaacaaagaaacaggagagtttaaagggtatgcgcatgtggatttcaaggatagtgtgtctgtggcgattgcgctgaagctggatcagcaggttatttgcggaagacctgtcaagatatgttgtgcacttaaagacagaccagctactgatcatacacctggtgaaacgaacaatgctggttcgtacaacatggaagatacttatgctgctgctgatccagtaccggctttagctgggcgtagcgaagttgatgacggaaactactttgcaactacggttagcagcagtaaggtcaaaaggagggtctgttatgagtgtggagaaaagggtcatctttctacagcctgtcccataaagcttcaaaaggctgatgatcaggcaaactcaaagctgggtcaagagactgttgatggtagaccggctatgcaaagctatggtcttccaaagaatagtggtgattcttactacatgaatgagacatacgcttctacaaatgaaacttataatggaggatactcagcatctgctgttggcactggtaaggtcaaaaggaggaactgttatgagtgtggagaaaagggtcatctttctacagcctgtcccataaagcttcaaaacacttctcacacaaactcaacgctggatcaccaaactgttgaggcaggaccgactcaggtaacaagctatagtcttcaaaagaaaacaagagacactgaaaacaatggtggttcgttcatggatgagagctatgctactgttccgatatccattgatgtgacaaatggagctaatgatgcaagcttaacatctgcggttagcactggtaagatcaaaaagagaaactgttacgagtgcggagaaaaaggtcatctttcttcagcttgccctaacaagctgcaaaaacaaggctga

SEQ ID NO: 2877 - DNA, 2238 bp, Arabidopsis thaliana
  Clone ID: AT_F5J5.C1.o21.tg
atgggcgatattgtggctgtcaaacctctggagaacgtccctagttctactcaatgtccgatgctcacatcaactaactacaccgtatgggctattcgtatgcaaattgcacgtagtgttaacaaaatgtgggagaccattgaaccagggatcgacgatggatataagaatactatggctcggggtctcatctttcaatccataccggaatcgttaaccctacaagtcggaactcttgcaacagcaaagttggtgtgggattcgataaaaactcgatatgtaggagcggatagagtcaaagaagctaggttacaaaccttgatggcagaatttgagaagatgaagatgaaagaaagtgagaaaattgatgtttttgcgggaagacttgcagaattagcaacaaggtctgatgcgttgggaagcaatattgagacatctaagctcgtgaagaagtttcttaatgctttaccactgagaaagtatattcatatcattgcttcactagagcaagttcttgatctcaacaacacaagcttcgaagacattgttggacgtatcaaggtatacgaagaaagagtttgggatggagaagaacaagaagatgatcaagggaagctaatgtatgcaaatactgacacacaagatagctggtatgcaagtagaggaagaggtcaaggaggaggttttaatggacgtggaagaggccggggaagaggatcccgagatacatcgaaagtaacttgttatcgatgtgacaaactcggacactatgcgtcaaactgcccggatagcgttaaaccaagtgtgttcgaaacagaactagatggtgacaatgtttggtatcttgataatggggctagtaatcacatgacgggtaatcgagcatatttctctaagattgatgagagtatcacagggaaagttagatttggtgatgattcttgcatagatatcaaaggaaaaggttcgatactttttatgagtaagaacggcgagaagaaagtcttagcagaggtctatttcataccagatgtaaagagtaacatcattagtctcggacaagcaactgaggcgggatgtaatattagaatgaaagaaaattatttaactctgtatgatcgagatggaaagctattggtaaaggcaatgaggtcaaagaatcgcttgtacaaggtcataatggaagtcaaagcttctaagtgcttctccgattgtgataactctggaacatttgtggttagcttcgaggaatttggaaataatggtatacgtgacgatgatcatgtcgaggaaacagagaatgtgggagaagaaacagagaaaccagggggagatggtttcgatgaaaataatgatatacatgtcgaagatgatcatgtttcatctaacatgggtagtggtgaactaacgcctccatctacaccaagaagatcggagaggcagaagaacaagccgtgttatcttaatgactacatcatgctagctgaactcgaaattgaaaggctcttaatgacaataaatgaagaaccgtgggactacattgaagctaaagagttaagagaatggagagaagcttttgagcttcctgctggagttaagccaatcggactaaagtgggtattcaagacaaaacaaaattctgatggtagtatcaacaagtacaaggcaaggcttgtggctaaagggtatgtgcaacgacacgggatagattttgatgaagtgtttgctccggtagcacgaatcgagacagttcgtctcatcattgctttggctgcctcaaacggatgggagatacaccaccttgacgtgaagactgcgttccttcatggagagcttaaagaagtagtctatgttactcaacctgaaggatatgtgacaaaagggaatgaagaaaaagtttacaagttaaacaaggcactttatggcttaaaacaagcacctagggcttggaacaacaaactaaactcaattcttaaagagttaagcctttgtgtccctccaatgacgatgttaactcaattaacccatcatatgctttccaagctaacaggtgaagaaaggatttatcgaagttctgattctattgatccttctgacacacgtggagataataacctcgtatatacacctgattttctcaataaaattaagttttctggagtacctaaccatatactttggttaaaagttggttgcccgttatgttgttgcgtaatcttgatccacatggaggtttga

SEQ ID NO: 2878 - DNA, 2517 bp, Arabidopsis thaliana
  Clone ID: AT_F3K23.C1.o7.tg
atgacttctgggcattcggaggtggaaaagttggatggagaaggagattacgtcctttggaaagaaaagttgcttgctcacatagagttgctgggtttgttagaagggctcgaagaagacgaagccattgaggaagaagagtcaacagctgaaactgattctttgctaacaaaaacagaagacaaagtcctaaaggagaagagaggaaaagctagatctacagtcatactgagtctaggaaatcacgttctaaggaaggtcataaaggagaagactgctgcaggtatgatcagagtgttagacaagctgttcatggctaaatctttaccaaataggatttatttaaagcaaaggctttatgggtataagatgtctgatagcatgactattgaagagaacgtgaatgatttctttaagttgatttctgatctggagaatgttaaagtttctgtaccggacgaagaccaagccattgttctgcttatgtcattacctaagcagtttgatcagctcaaagatactttgaagtacggcaaaaccactcttgctcttgatgagatcacaggagcaatcagatctaaggtattagagcttggagccagtggaaaaatgctcaagaacagctctgacgctctgtttgttcaagacagaggaagatctgagaaacgagacaagagtagtgaaagaaacaagagtcaaagcagatcaaagtcaagggaaaagaaggtgtgttgggtttgtggcaaggaaggacattttaagaaacaatgttatgtctggaaagaaaagaacaagaaaggaaacaactcagagaagggagaatcctctaatgtcataggacaagctgcagatgctgctgctttagcagtaagagaagagtcgaatgcagacaatcaagaagttgacaacgagtggataatggacacagggtgctcatttcatatgacaccaagaagggactggtttgttgagtttgatgagtcacaaaccggaagagtgaagatggcaaatcaaacatattctgagatcaaaggcattggaagcataaggattcagaatgatgataatacaaccgttcttctcaagaatgtgagatatgtcccaagtatgtccaagaacttgatctcgatgggaacattagaagatcaaggttgctggttccagtctaaggctgggacattaaaggttgtcaaaggctgcatgacactacttaaaggaaagaaagttggtactttgtacctcttgcaaggagttgttgtaacaggaaatgcaaacgcagttacaagctcaaaagatgaatcaaagatatggcacagcagattatgccatatgagtcagagaaatattgatgtgttgatcaagaaaggatgccttcaagctgaaaagataaatggtctcgagttttgtgaagactgtgtgtacgggaaaacacatagagttggttttgggtctgcaaaacatgtcacaagagagaaacttgagtacattcactcggatctttggggagcgccatcagtaccaaactcactaggtaattgtcagtactttatcacgtttattgatgaccttacaagaaaaaacaaggaaacagtcaaggaattaaaggaaagactgagttcagagtttgaaatgaaggatttggggcctgcaaggaaaattctgggaatggagataacaagaaaccgagaagaaaatattttggagttatctcagagaagttatctgcaaaaggtgttaaagacattcagaatggatgaatgcaagcctgttaaaacaccattggcaccacatatgaagtttgtagcagcaacagagactgaagcagaggagcaagctgatcaaatgaagtctataccttatgcaaatgcagtgggaagcataatgtattctatgatcgggtcaaggcctgaccttgctcatcctgttggagtcataagtaggtttatgagtaaaccattgatgaatcattggctaggtgtgaaatgggttctccgttacattaaggggtctattgattcaaggctgcagtacaagagagaaggtgattttgtggtgacagggtactgtgattcagatcactctggagatcgtgatcgaagtagatcgaccacagggtacacattcactgtaggagggaacatagtaagctggaggtcatgcttgcagccagttgttgcactgtcatcaacagaggctgagtatatagccttaacagaggctgcaaaagaagcatattggctaaaagacttgatgaatgagctgggatttaaacaaggagcggtagatatccattgtgattctcagagtgctatagctttagcaaagaatgcagttcatcatgaaaggacaaagcatatccagagaaggtttcattacatcagagatgcaatcactgatggagaagtgaaagtgctgaaaatatccacagttcataatccatcggatattttcacaaaggtggtaccggttaacaagttcctgagcgcgttgaagaagctcagggttacaagtgcctga

SEQ ID NO: 2879 - DNA, 1005 bp, Arabidopsis thaliana
  Clone ID: AT_T27D20.C1.o19.tg
atggctactttgacggaggagttaaggggattaaggaaacggctaggccgcttagaacagccctatcccagggttgaattggggcaagaccaggctcgtaggaatgcccgcgaggaggcggaggagtttcctgacttggatgatgaagatgatccacctcccgaccctttgagacgccaacaccaacggagagaagatccattgatgagaaaccgtgcacgaggagtagagcctcgaaaatctaatccagaggtgtacatggattgggagcgacggatggagtacatcttcgaatgttatggtatggagaatctcggaaggacagtagctgataggaggagaaaaagatttggtcccataaacacttggggagacatgaagtacctcttaaggttgagaatgttgtctcaaggaacaaggaccgtcgatgagtactttgaggagtttgagaagctcatgaacgccttggagttagaggaatctgacgaagctctcatggctcaattcatagatggattacaagagaggattcagcgaaaggtggagagagcccaatataatggactccatgagttgctacacctagcggtacaagtcgaacagcaaatcaggcgtaaggcatccttaagcaaccgatccagaaacaacacgccttggaatgcaagcaacaaccgagccatggacaaaagcaaggtcgtagagagtgatcataggttcaagaacaagtctaatgaggcacctaaaacctctaggcccaaacttggtaagttccctagtactaatcaatctcgttctcgttacattacttgtttcaaatgtcaaggtagaggacacatggcgagagaatgtctgaaccaaagggtgatgatcctcactcctagtggtgactatgagtcacaagatgagcaagaggattctgatgagcatgaggacattgagtatcccgatgtaggagaactccttgtgattcgcaggacattgagtgtgttcgttaacctcgaatga

SEQ ID NO: 2880 - DNA, 1119 bp, Arabidopsis thaliana
  Clone ID: AT_F18P9.C1.o20.tg
atgaagaaaatcacgattccggtagaatctcttgacgaagaagacgatttcctactacaactcgccgcaattgaagctgaagcagcagcgaaacgccctagggtttcttctataccggaaggaccatacatggcggctctaaaaggaagcaaaagtgatcaatggcagcaaagtccattaaatcccgcctctaaatctcgcagcgtcgctgttaccaccggcggttttcaaagatcagacggaggaggaggcgtcgccggtgaacaagattttccggaaaagagttgtccctgtggagttggtatctgtttgattcttacttcaaatacaccgaagaatccaggtcgcaaattctacaagtgtcccaatagagaggaaaacggtggttgtggatttttccagtggtgtgatgcggttcagtcttctggaactagtactactactagtaatagctatggaaacggtaatgatactaagttcccggatcatcagtgtccgtgtggtgcgggtttgtgccgtgtgttgactgcgaaaacaggcgaaaacgttggccgtcagttttatcgatgtcctgtttttgagggctcttgtggtttcttcaaatggtgcaatgacaatgtagtcagctctcctacgtcgtatagtgttaccaaaaacagcaactttggtgactcagataccagaggatatcaaaatgcgaaaacgggcacgccctgttataaatgtgggaaagaagggcactgggcaagagattgcactgttcagtctgatacgggaccagtaaagtctacatctgcagctggagattgttttaaatgcggaaagccagggcactggtcgagagattgcactgctcaatctggtaatcccaagtatgaaccagggcaaatgaagtcgtcatcttcaagtggagaatgttacaaatgcgggaagcaaggacattggtcgagagactgcaccggtcaatctagtaatcaacaatttcaatcagggcaagcaaaatccacatcctcaactggagattgctacaaatgcggaaaagcaggacattggtcaagagattgcacttcccctgctcaaactacaaacactccaggcaaaagacagaggcagtactag

SEQ ID NO: 2881 - DNA, 690 bp, Arabidopsis thaliana
  Clone ID: AT_F10A5.C1.o6.tg
atgagatctgaacgagtttcttaccatgatgctccttctagaagggagagggagccacgtcgtgccttcagccaaggaaatctctgcaacaactgcaagcgacctggtcactttgcaagagactgttctaatgtttccgtctgtaacaactgtggtcttccagggcacattgcagcagaatgcactgcggaatcacgttgttggaactgtagagaaccgggccacgtagcctcaaactgttcaaacgaaggaatctgccactcctgtggtaaatctggacatcgagccagagactgctctaattcggattctcgtgcaggagacttaaggctctgcaacaactgcttcaaacagggacatcttgccgctgactgcacaaatgacaaggcgtgcaagaactgcaggacttcaggtcacatagctcgcgattgcaggaacgatccagtttgtaacatctgcagtatctcggggcatgttgctagacactgcccaaagggtgacagcaattactctgacagaggaagcagggttcgagatggtggtatgcaaagaggtggtttgagcagaatgagcagagacagagaaggcgttagtgctatgataatatgtcacaattgtggtggccgaggacacagggcgtacgagtgtccgtctgctcgagtcgctgaccgtggattccgccggtactga

SEQ ID NO: 2882 - DNA, 783 bp, Arabidopsis thaliana
  Clone ID: AT_T18D12.C1.o60.tg
atgccgccgaagcgtaaagatataaactttctttttgatgacggagaagatacagttgccattatagatgatgaagctaatgaagatctaagattgaagatattagagaaagctttttcgaggcgtaatgttgataacaagcttgattctgatctctccttcgatcctggtgtagttagtactgtgatggttaatggaggaaagtcggaggaagttaaaaactctaagagtaataagaagatgaagagaaataagcttgaagctgccaatgaaattgtaacccattgtgtggaaagacaagatgaggataacatggtggaggatgtagtaagaggtgaagaagaagatggagaaacaactagcaattcggttatgacaaagcttcttcgtggagcaagatactttgaccctcttgatgctggttgggtaacttgttatagctgtggggagaaagatcatataactgttagttgtccaactcttaccaattgtaggaagtcgtgctttatatgcgctagtttggagcatggtgcaagacagtgtacaaaggtatgggacattgatgcaaacctcggaatccaccaagacaagactcaaagattcaaaggtaaactatgcggaagtggtgatgatgatgaagtaaccgatttgatgttgaatccacaacaccgagggctagagaatatgatccaagggctattcctcgcgaggatcagagactacacgaaacctaagtggtttgattccacaaactacctagaactcgcaagaacaatgatttga

SEQ ID NO: 2883 - DNA, 3792 bp, Arabidopsis thaliana
  Clone ID: AT_F6N18.C1.o14.tg
attccaaggccggagagaaacgtgatcctcaccggagcgcaaagaacagagttggcggagaagacggtgaaggaccacaaagtgaagaactatctatttgcatcaatagataagacgattctcaagacgattctgcagaaggagacgtcgaaggacttgtgggagtcaatgaaaaggaaatatcaagggaatgatagggttcaaagcgctcaactgcagaggttacggagaagctttgaagttcttgagatgaagattggagaaacaatcacgggttacttctcaagagtgatggaaatcactaatgatatgcggaatctgggagaagacatgccagactccaaagtagtggagaaaattctgagaacattggtcgaaaaattcacatacgttgtgtgtgctatagaagagtctaacaacatcaaggagcttacggtggatgggcttcaaagttctttaatggtgcatgagcagaacttgagtagacatgatgtggaagagagagtgttaaaagctgaaactcaatggagaccggatggaggaagaggcagaggaggaagtccaagccgaggaagaggtagagggggttaccaaggaagagggcgtggctatgtgaacagagacacggtagagtgtttcaagtgccacaagatgggacattacaaggcggagtgtccaagttgggagaaagaagcgaattatgttgagatggaggaagatctgcttctcatggctcatgtagaacagattggtgatgaagagaaacaaatttggttcttggactcgggatgcagtaaccacatgtgcggtacaagagagtggttcctcgagttggatagtggttttaagcagaacgtgagactaggagatgatcgaagaatggcggtagaaggaaagggaaagctgagacttgaagttgatggaagaattcaagtgatctcagatgtgtactttgtgccagggttgaagaataacctctttagcgtgggtcaactacaacaaaaagggttaagattcatcattgaaggtgatgtgtgtgaagtgtggcacaaaacagagaagagaatggtgatgcactcaacgatgacaaaaaatcgcatgtttgtggtttttgcagctgtgaaaaagtcaaaggagactgaagaaacaagatgccttcaagtgatcggcaaagctaacaatatgtggcacaagagatttggacatctcaaccatcaaggcttgagatcgctagctgaaaaagagatggtaaaaggcttaccaaagtttgatcttggagaagaagaagcagtttgcgatatatgcttaaagggtaagcaaatccgagagtcaattccaaaggagagtgcgtggaaatcaactcaggttctgcagcttgttcacacagacatttgtggaccgataaatcctgcatcaaccagtgggaaaaggtacattttgaactttatagatgactttagccggaagtgttggacttatttgttgtcggagaagtcagaaacatttcagttcttcaaggaatttaaggctgaagtcgaaagagaatcaggaaaaaaattggtatgtttgcggtcagacagaggaggagaatataattcgagggagtttgacgagtactgcaaggaatttggaatcaagagacaactcaccgcagcatatacgccacaacaaaacggtgtcgcagaaagaaagaatcggagcgtgatgaacatgacgcggtgtatgttaatggagatgtcagtgccaagaaagttctggcctgaagctgttcagtatgcagtgtatatactgaatcggagtccgtcaaaggctttaaatgacataactccggaagagaagtggagtagctggaaaccatcagttgagcatctaagaatatttggcagcctagcatatgctcttgtcccgtaccagaaaagaatcaagcttgatgagaaaagcatcaaatgtgtgatgttcggtgtaagcaaggaatccaaagcctatcgtctctatgaccctgcaacaggaaaaatattgattagtcgggatgttcagtttgacgaagaaagaggctgggaatgggaagataagtcgctggaggaagaacttgtgtgggacaattctgatcatgaacctgcaggagaagagggtccagaaataaaccacaacgggcaacaagatcaagaggaaacagaagaagaagaagaaacggtagcagaaacggttcatcaaaatctcccggctgttggaacaggaggtgttagacagagacaacaaccagtttggatgaaagattatgttgttggaaacgcccgggtgctcataacacaagatgaagaagatgaagttcttgcgttgttcattggaccagatgatccggtttgctttgaagaagcggctcaattagaggtgtggagaaaggcgatggaagcagagataacctccatagaagagaataacacatgggagttagttgaattacctgaagaagcaaaggtgattgggctgaagtggattttcaagactaaattcaatgagaaaggagaagttgataagtttaaagcaagactggttgcaaagggctatcatcagagatatggagtggatttctatgaggtatttgcaccagtagctaagtgggatactatcagattgattcttggcttagctgcagagaaaggatggagtgtttttcaactagatgtgaaaagtgcgtttttgcatggagacctaaaggaagatgtgtttgttgagcagcctaagggattcgaagtggaagaagaatccagcaaggtgtacaaattgaagaaggccttatatggcctaaaacaagctccaagagcttggtacagccgtatagaagaattctttggtaaagaagggttcgaaaagtgctactgtgaacatacactgttcgtgaagaaagagagaagtgacttcttggtggtaagtgtgtatgtggatgatcttatttacacaggaagctcgatggagatgattgaagggtttaaaaattctatgatggaggaatttgctatgactgatcttggaaagatgaagtacttcttgggagttgaggtcatacaagatgaaagaggtattttcatcaaccaaagaaagtatgctgcagaaatcattaagaagtatggaatggagggatgtaattcagtcaagaatccaattgtgcccggacagaagttaacaaaagctggagctgttagtaggtacatggaaagtccaaatgagcaacacttgttggctgtgaagagaatcttgaggtacgttcaaggtacgttggatctcgggattcaatatgaacgtggtggtgctacagagttggttggcttcgttgatagtgattatgccggtgacgtcgatgacagaaagagcacctctggttatgtgttcatgttaggtggaggagctatagcttgggcatctaagaagcaaccaattgtgacattatcaacaacggaagcagagtttgtgtcagcttcttatggtgcgtgtcaagcggtatggctcagaaacgttttggaggagattggctgcagacaagaaggaggcacacttgtgttctgtgataacagctccaccataaagttgtcaaagaatcctgtactacatggaagaagtaagcacattcatgtgaggtatcattttctcagagagttggtgaaggaaggaactattagacttgactattgtactactacagaccaagttgcagacatcatgactaaggctgtgaaacgtgaagtgtttgaagagcttcggggaagaatgggagtaagaagaagagaagaataa

SEQ ID NO: 2884 - DNA, 1425 bp, Arabidopsis thaliana
  Clone ID: AT_F15A23.C1.o8.tg
atggagacaataatctactctagctctgatgaagaggactcatatggatgtagtcaagactcgtactacaacgagactagatttgttgagtcatggcatgatgatggctactcatcaagctcggattttgaggaagaaccagatggtggagcacctgaaccggaaccaccagaccgttatagcagccatgccacaccgccgagctattcgaagccatggatctcatggaatcccatacccaagaccaatttctatcctactttctaccccactcgcaaagttatatacaaattatttgtgcataatggtagtaaaacttacggacctgaattctttttgttttcaggattgggctatctacagtgggagagtaatatgaattactattttgagtttcattccacagcacaagaagacaagctttcgattgccctaggacaacttaagggtagtgctttgtggtggtgggatcaagatgagtacaaccgatggtatgaaaggagagcaccgatccgaacatgggagagactaaagtggaacatgtgtgcaaaatactccccacaaagtttgtcaccagcacatgtggtgcaacaaaagcaaaaaccaacatttttgcctcaaatgcaagcgacaactcaaggtaagtgtacttttcaaacaaagcatgttgaactaacatgttacaggtgtaaacaagagggacacattgccaagatctgccccacgagagagactacaacaaaggtaggattggagcaacaagaattgttaaaggctaaagagaaacaagaaattgtttcaagtccaaaaggtaaaaatgaacaagccgaaacttgtcaaactgatttaaacaactcaatgaatgtgataacacacttgtctagtgccaaaagcattgcgaaagtttcaggtacaaaagaaaacattacagatcaaggagaagcttcaacaatggagaaagtgttcacggaagaaagtaaaaaccaaggaggaccaacactggacgaaattactgtgaataaagatgagagtgtcaatgacactattcagatcaaaggagaaccatcggatgctcaacaatttcccaaaactcaatgtaaccttctaaacccttatacacttcaatggactaacttgacttatctatgtgtaggtaaaaaagttttgaggacaaaacctcttgaagaaggaggggatgatgtaagaatgggagctgacgtaccggctgatgcacttgttgacagactgcttgctggattttttgatggactttctgacggactacctgaagtacttcacgtatcaaaccagcttgtgcgaactaaggaaagctatcctttccttcccttttgtgcgtcccagagccacatatggaagcttggagatcctttacgccacccagaaccattcacacttaatccttag

SEQ ID NO: 2885 - DNA, 3027 bp, Arabidopsis thaliana
  Clone ID: AT_T26N6.C1.o3.tg
atggactaccccaaagagttcgttgcggtcggtaaaacaatcatgttggaaaaaggaaattatggacactggaaagtgaagatgagagctctcatacgtggtctaggaaaggaagcttggattgctacgagcattgggtggaaggctccggtcatcaagggagaagatggagaagatgtgctaaaaactaaagatcaatggaatgatgcagaagaggcaaaggccaaagctaattcaagggcactgtctttgatattcaacttcgtgaatcaaaatcaattcaagcggattcaaaactgtgaatcagctaaagaagcatgggataaacttgctaaagcatatgaagggacaagtagtgtcaaaagatccagaatcgacatgttagcatctcagtttgaaaatctcagtatggaagaaacagagaacattgaggagttcagtgggaaaatcagtgccatagcgagtgaagcacacaatctaggaaagaaatacaaagataagaaactggtcaagaaactgttgaggtgtctcccatcaaggtttgaaagtaagagaacggccatgggaacgtcgttggacactgactcaatcgattttgaagaagtagtgggaatgctccaagcatatgaattagaaatcacttccggaaagggaggttactccaaaggacttgctttagcagcatcggcaaagaagaatgagatacaggaattgaaggatacaatgagcatgatggcaaaagacttcagtagagcaatgaggagagttgagaagaaaggattcggaagaaatcagggaactgatagatatcgagaccgaagttcaaaaagggatgagattcaatgtcatgaatgtcaaggatacggacatattaaagctgaatgtccctccttaaagagaaaagatctcaagtgctctgagtgtaatggtcttggacacactaagttcgactgtgttggatcaaagtctaagcctgataaatcctgcagttctgaaagtgaaagtgactcaaatgatggagactcggaagattatataaaaggtttcgtgtcttttgtaggaatcattgaagaaaaagatgaaagttcagatagtgaagcagatggtgaggatgaggacaactcagctgatgaggattctgacatcgaaaaggacgttaacatcaatgaagagttcaggaaactgtatgacagctggttgatgctgagtaaagagaaagttgcctggctggaagagaagctaaaagttcaagaactaacagaaaagctgaaaggagagttaactgctgcaaatcagaagaactctgagctgattcagaaatgcagtgtggctgaagagaaaaacagagaactttctcaagagcttagtgacactcgcaagaacatccacatgctgaacagtggaacaaaagatttggatagtatacttgctgctggaagagtgggaaaatcaaattttggtttaggatacaatggtgctggatcaggtacaaagacgaattttgtacgaagcgaagctgctgctccaacaaaaagtcaaacaggttttcgaagcaactatgatgctgttccagcaagacgcgtgtaccagaatcacgatcactatcaatcccggagaactgtgacaggttacgaatgttactactgtggaagacatggtcatattcagagatattgctacaggtatgctgctaggttgaataagctgaagagacaaggaaaactatatccatatcaaggaagaacctccaagatgtatgtcagaagggaggatctctattgtcatgtagcatacacctcgattgaagaaggaataaagaaaccatggtattttgacagtggagcatccagacatatggtaggaagtcaatccaatcttgaaaattacacctctgtcaaggaaagtaaagttacttttggaggtggggataaaagaaaaatcaagggaaaaggtgatttgactaaagcagaaaagcctcagcttacaaatgtgtactttgtcgaagggcttactgcaaatctgattagtgtgagtcagctatgtgatgaagggctgactgtgagtttcaatagtgtaaaatgctgggctacaaacgagaagaaccaaaacactctcactggagttagaactgggaacaattgctacatgtgggaagaacctaaagagtgtcttagagctgaaaaggaggatccagtggtatggcatcaacgtcttggtcacatgaatgcgaggagcatgtcagaaatagtgagcaaagaaatggttagaggagtacaagagctgaaacacatagagaaaattgtgtatgatgcctacaatcaaggtaaacagattagagtccaacacaagagagttgtaggtgttgttgagagaaagaatcagacttttcaagagatggccagagccatgattcatggacatggagttcctgaaaaattctggacagaggctatcagtacagcatgttatgtgataaatcatgtttatgtgaggattggaggcacattcgacaagttggtcaaagcgtttgtgaagacaatgacaactgagttcaggttgagtatggtaggcgaacttaagtactttcgggggttgcaaatcaatcagattaatgaagggattgctatctcgcaaagcacctatgctcagaacctggtgaaacgcttcgatatgtgttccagcaatccagttgaaactcctatgagcactaccaacctctgcagctgcagtactaaaattctttggatgaaacacatgggtttggattacggtatgtctttttctgaccctttacttgttaaatgtgataatgaaagtgctattgccatatctaagaatccggtacaacactcaatcactaaacacatagctataagacatcattttgttagagaattagttgaagaaaaacaaattaccgtagaacatgtgcctactgaaattcaacttgctgatattttcactaagcctttggacttgaacatgtttgtgaacttgctaaagtccctaggtattggtgaagtctaa

SEQ ID NO: 2886 - DNA, 4836 bp, Arabidopsis thaliana
  Clone ID: AT_T16I21.C1.o9.tg
atggtgatcgtgggaaggacttggcttaggcgcgagagactcaaggccgagatgatgggtggtgatagttcggagttatgtggattaactttggaggtttcgcagatgggtaagagcagcaaaacgggaaagagtaagaaggacaagggcattgtcgaggagactttggttgaggaggaaacgatgatcaacgagaaaaccagagtcgggacgatgttcgatgggacagactcggccggacctgaggccgggaagaagtccataaatgaggaagcaccggagagtagtggtgcaagggacagcacggataaccggaacaatactccaacggcccaagaacagtgggatttgatgaagggaatgatggcgcaactagccacattgactaaggccgttatagcggatccggtggtcctaaaagtggataaccaaaaggatgatgactcggaagttgtggaagtgaatccacaaccgaatcatgggcggaaaaggggagactatctgagtcttctcgaacatgtctcaaggctgggcacgagacacttcatgggcagtacggacccgattgtggccgatgagtggaggagtagactcaagaggaacttcaagtctacccgctgccctgaggattaccaaagggacattgcggtccacttccttgaaggagacgcccataactggtggttaaccgtcgagaaacgcagaggggacgaggtccggtcctttgcggatttcgaagacgagtttaacaagaagtactttccaccggaggcttgggataggcttgaatgtgcgtaccttgacctagttcaagggaaccgcacggtgcgtgaatatgatgaggaatttaaccgcctaaggcgttatgtgggacgtgaacttgaggaggaacaagctcaactgcgccgatttatccgtggactaaggatagagatccgcaaccattgtttggtccggacattcaactcggtttccgaattggttgaaagggcagcaatgattgaggaagggatcgaggaggagaggtacttgaaccgggagaaagcaccgatccggaacaatcaatccaccaaacccgcggataagaaaaggaagtttgacaaggtggataacaccaagtccgatgctaagaccggggaatgcgtgacctgtggtaagaatcacagcggaacttgctggaaggccataggtgcatgtggccggtgtggaagcaaggaccatgcgatccaaagttgcccgaaaatggaaccaggacagtccaaggttctcggtgaagagacaaggacttgtttctattgcggaaagactggacatctaaagcgagagtgccctaagttgactgcggagaagcaggccggacaaagggacaatcgcgggggaaatggactgccgcctcccccaaagcggcaagccgtggcatcgcgagtttatgagttgtcggaggaagctaacgatgccggaaacttcagggcgatcactggtgggttcaggaaagaaccaaacaccgattatggaatggtacgagcggccggcggacaggcaatgtatccgaccggacttgttcggggcatctcggttgtagtgaacggtgtcaatatgcccgcggacctaatcattgttccactaaagaaacatgatgttatcttagggatggactggttggggaagtacaaggcccacatagattgtcaccgaggacggatacaattcgagagggacgaaggtatgttaaaattccaaggaataagaacaacctcgggaagcttggtaatctcggcaatccaggctgaaaggatgctcgggaaaggatgtgaggcatatttagccacgatcacaaccaaggaagtgggggcgagtgcggagttgaaagacattccgatcgtcaacgagttctcggacgtgtttgcggccgttagtggtgtaccaccggaccggtcagacccgttcacgatagaactcgagcccgggacaacccccatatctaaagctccgtaccggatggcaccggcggaaatggcgaagctaaagaaacagttggaggagttgttggataaaggattcatcaggccgagtagctcaccatggggtgcgcctgttctgtttgtgaaaaagaaagatggtagctttaggctatgcatcgactatcggggattgaataaagttacggtgaaaaacaaatatcctttaccccggatagatgagttgatggatcaacttggaggtgcacagtggttttcaaaaatcgacttggcctcaggatatcaccaaattcccatagagccaacggacgtgaggaaaacggctttccggacaaggtacgaccactttgagtttgtggtcatgccattcggattgaccaatgcaccagcagctttcatgaaaatgatgaatggggtattccgggatttcttagacgagtttgttatcatcttcattaacgatatccttgtttactcaaaatcttgggaagctcaccaagaacatctaagggcggtgctggaacggctaagggaacatgagctatttgcgaagttaagtaaatgctcattttggcaaaggagtgttggttttcttggtcatgttatctcggaccaaggagtatcggttgatccggagaaaatacggtcgataaaggagtggccacgaccaaggaatgccaccgagattaggagttttctcggactagcggggtattaccgaaggttcgtaatgagttttgcgagcatggcccaacccttgacccgactgaccggaaaagacaccgcattcaactggtcggatgagtgcgagaaaagcttcctggagttaaaggccatgttgactaatgcaccagtattggtcttaccggaggaaggtgagccctatacggtttatacggacgcatcaatagtgggactaggatgcgtactgatgcaaaaggggagtgttatcgcatacgcatcaaggcaattgcggaaacatgagaagaactaccctacgcatgatttggaaatggccgcggtagtatttttcttgaagatttggcgatcatacttgtatggtgctaaagttcaaatctatactgaccacaaaagcctaaagtacatattcacccagccggagttgaatctaaggcaaagaaggtggatggaacttgtggcggattacaacttggatatagcgtaccatccgggcaaggccaaccaagtcgccgacgccctaagtaggaggcgctcggaagttgaggcggaacggagccaagtggacttggttaacatgatggggacattgcatgtgaatgccttgtctaaagaagttgaacccttagggttgggagccgccgatcaggccgacctgcttagtaggatccggctggctcaggaacgggacgaggagataaaaggatgggctcaaaacaataagaccgagtaccaaacctcgaacaatggtacaatcgtggtgaacggtcgagtatgtgtgccgaacgatagggcattaaaggaggagatcctaagagaggcccatcaatcgaagttctcaatccatcctgggtcgaacaagatgtaccgcgaccttaaaaggtactaccattgggtaggaatgaagaaagacgtggccagatgggtggccaagtgcccgacttgtcaactggtcaaggcggagcatcaagtaccaagtgggttgttacaaaacctacctataccggaatggaagtgggaccacataacgatggacttcgtcactggactgccaacggggatcaagtccaaacacaatgcggtatgggttgtggtagaccgattgactaagtctgcgcacttcatggcgatctcggataaggatggagcagaaatcattgccgagaagtatatagacgagatcgtgcggttacatgggattccggttagtatagtgtcagaccgagacacaaggttcacgtcaaagttttggaaggctttccaaaaggccttaggaactcgagtgaacctaagtactgcctaccacccacaaacggacgaacagtccgaacgaacgattcaaaccctcgaggacatgttgagggcatgcgtcttggattggggaggaaactgggagaaatatctaaggttagtagagtttgcatacaataatagttttcaagctagtattggtatgtctccctatgaggcgttgtatggccgagcttgtagaacaccgttgtgttggacgcccgtgggcgaacgtcggttgtttggacctacgatcgtggatgaaaccacggagagaatgaagttcttaaagatcaagttaaaggaagcccaagatcgacagaaaagctacgccaacaaacgtcgaaaggaattggaattccaagtaggagatttggtgtacttaaaggcgatgacctacaaaggggcaggacgattcacctcaaggaaaaagttaagcccaaggtatgttggcccgtacaaggtgatcgaacgagtaggggcggtggcatacaaacttgaccttcctccaaaactaaatgcgtttcacaacgtcttccatgtgtcacaattacggaagtgtttaagtgatcaagaagaaagcgtggaagatatacctcccgggttaaaggagaacatgacggtggaagcatggccggtacggatcatggaccgaatgacgaaagggactcggggaaaagcaagggatttgttaaaagtcttgtggaattgtagaggccgtgaggaatacacttgggaaaccgagaataagatgaaggccaattttccggagtggttcaaggagatgggtaaagatcaacttgatgcggattcgaggacgaatccaattcaagggggggagacttgtaacgcccgcgatcctcaatag

SEQ ID NO: 2887 - DNA, 3243 bp, Arabidopsis thaliana
  Clone ID: AT_K9P8.C1.o7.tg
atggtgaaggtacgaatgaacacggcggacgtcgccgccgaagtcaagtgcttgaagcgattaatcggtatgagatgctccaacgtctatgatatatctcccaagacgtatatgttcaagctcttgaatagtagcggtatcacagaatctggtgaaagtgagaaagttttgcttttaatggaaagtggtgttcgtttacataccacagcttatgtcagggataagagtaatactccatctgggtttactttgaagttgaggaaacatatcaggactaggaggcttgaggatgttcgacagcttggttatgataggattattgtcttccagtttgggctaggtgctaatgctcactatgttatattggagctgtatgctcaaggaaacataattcttactgattctgagtatatgatcatgacactcctccgctctcatagagatgacaataagggttttgctattatgtctcgtcaccgttacccgatagagatatgtcgagtctttgagagaacaactgtttcaaagcttcaggaatcacttactgctttcgtgcttaaggatcatgacgcaaaacagattgaaccgaaggagcagaatggtggcaaaaagggtgggaagtcaaatgattctacgggtgccaaacaatatacattgaagaatattcttggtgacgctttaggctatgggccacagctctcagagcacattattctggatgctggtctagttccaactaccaaactttcagaagacaagaaattagatgataatgagattcagttattggttcaagcggtgatcgtttttgaagattggcttgaagatattataaatggtcaaaaagttcctgaaggttatattctaatgcaaaaacaaattttggcaaatgacacgacttctgaatcaggaggtgttaaaaagatgtatgatgagttctgttcaatcttactaaatcaattcaaatcaagagtgtatgaaaagtttgaaactttcgatgcggctttagatgagttctacagcaaaattgagagccaaaggtctgaacaacaacaaaaggcaaaagaagattctgccagtctgaaactcaataagattcgccaagatcaggagaaccgtgttcaaattctgaagaaagaagtcaaccattgtgttaatatggcggaattaatcgagtacaacttagaagatgtagatgctgccatattagctgttcgtgtagcacttgcaaagggtatgggctgggatgatctagctcgcatggtcaaggaagaaaaaaaattaggaaatcctgttgctggagtcattgacagactttatctggagaagaattgcatgaccttgttgttgtgcaacaatctcgatgaaatggatgatgatgagaagacggttccagtggaaaaggtggaggttgacttatcactttctgcgcatggtaatgctaggcgctggtatgaaatgaagaagaagcaagaaaccaaacaggagaagactgtttctgcccatgaaaaggcttttagagcagctgagaaaaagacccgccaccaactttctcaggaaaaagtggttgcaacgatttcacacatgagaaaagtccactggtttgagaaatttaattggttcattagcagtgaaaactacttggtcatcagtggtcgtgatgctcagcaaaatgagatgatagttaaacgttacatgtcaaaaggagatctgtatgtacacgcagagcttcatggagcatctagtactgtgataaagaatcataaacctgaacaaaatgtaccgcctctcactttaaaccaagctggatgttttacggtttgtcatagtcaggcctgggattccaagattgttactagtgcatggtgggtttatcctcatcaggtcactaaaacagctcctactggggaataccttacagttggaagtttcatgatacgaggtaagaaaaactttcttccaccacacccactcatcatgggttttggattattgtttcgtttggacgagagctccttgggagctcatttgaatgagagaagggtaagaggggaagaggaaggaatgaatgatgtagtcatggaaacacatgctcctgatgagcattcagatactgagtcagagaacgaagcagtgaatgaagtggtttctgcctcaggagaagttgatttgcaggaatcaagtacggcattgagccaagatacttcttctttagacatgagttcatctggtattactgaagaaaatgttgcatcagccacctcacagcttgaagatcttcttgatagaacccttggtcttggtgctgcaacggtggcaggcaagaaagatacaatagagacatcaaaagatgatatggaagagaagatgaaacaggaagagaagaatgcagtagtgagagataagccttatatgtcaaaagctgaaagaagaaagcttaagatgggccaaagcggcaacacagctgctgatggtaacactgggcaagaaaagcagcaacgaaaggaaaaagacgtttcttctttaagccaagctaccaagagcatacctgataacaagccagctggggaaaaagttagccgtgggcaaaggggtaaacttaagaaaatgaaggagaagtatgctgatcaagatgaagacgaaagaaaaatacggatggcattgttggcatcgtctggaaagccacagaagactgatgttgaatcacagaatgcaaaaaccgcggtcactgaagtgaagaaaccttctgaagagacagacgatgctgtgaaaatatgttacaggtgtaagaaggttggacatcttgctagggattgtcatgggaaagaaacttcagacatggacaaagtggtgatggaagaagacgatattcatgaagttggggacgaagagaaagaaaaactgattgatgtcgattaccttactggtaacccgttaccaaccgacatccttttatatgcggtccccgtgtgcggcccctacaatgctctccagtcatataaatacagagtcaaagcgattccaggcagcatgaagaaaggaaaagctgcaaaaactgcaatgaatctgttcacacatatgtcggaggcgtcagtaagggagaaagagttgatgaaagcttgtacggatccggagctgatggctgctcttgtcgggaatgtgaagatcacagcagcaggtttgacgcagttgaagcagaaacagaagaagggcaagaaaagcgggaaacaacaacatagctag

SEQ ID NO: 2888 - DNA, 3648 bp, Arabidopsis thaliana
  Clone ID: AT_T9F8.C1.o8.tg
atgaaagctattatgaggaagaggttcgtccctagtcactaccaccgagagctgcatctcaagttgaggaatcttacacaagggaaccgttctgtcgaagagtactacaaggaaatggagactttgatgttgcgggctgatatttctgaggatagagaagcaactctgtcaaggtttcttggggatttaaacagagatattcaagacagattggagactcaatactatgttcaaatagaagagatgttgcacaaggcgattttgtttgagcagcaagttaagaggaagagttcttcacgatctagttatggttcaggaaccattgctaagcctacttaccaaagagaggagagaaccagcagctatcataataagccgattgtcagtccaagggccgaaagtaaaccatatgctgcagttcaagatcacaaaggaaaggctgaaatttctacatctagagttcgtgatgttagatgttacaaatgtcaagggaaaggacattatgctaatgaatgtccaaataagagagtcatgattctcttggataatggagaaatagagcccgaggaggagattccagattcaccttcttcattgaaagagaatgaggagctgccggctcagggtgagttgttggtagctaggagaactttgagcgtccaaaccaagaccgatgagcaagaacagaggaaaaacttgtttcacacgcgttgccatgtgcacgggaaagtttgcagcctcatcatagatggagggagttgtactaatgtggcaagtgaaactatggtcaagaaacttggattgaaatggcttaatgacagtggaaaaatgagagttaaaaatcaagtggttgtgcccattgtcatcgggaagtatgaagatgagatcttatgtgatgtattaccgatggaagctggacatattcttcttggaaggccgtggcaatctgatagaaaggtaatgcatgatggtttcactaatcgtcattcctttgagtttaaaggagggaagactattctggtctctatgactccacatgaggtttatcaagatcaaatacatctgaaacaaaagaaagaacaagtcgtcaagcagcccaacttctttgcaaaatctggtgaggttaagagtgcttattcttctaaacaaccaatgttattgtttgtttttaaagaagctcttacgagcttaactaactttgcaccggtgctgccgagtgaaatgacttctcttttgcaggattataaagatgtatttcctgaagacaacccgaaaggactaccaccaattcgtggaattgagcatcagatcgattttgtgccaggagcttcacttccaaaccgaccagcatatagaaccaatccggtggagacaaaagaactacaaagacaaaaagatggcagctggagaatgtgttttgattgcagagccatcaacaacgtaacggttaagtattgccatcccatccctagattagatgatatgcttgatgaattgcatggttctagcatattctctaaaattgatcttaaaagtggctatcatcaaattaggatgaacgagggagatgaatggaaaactgcatttaaaacgaaacatggtttatatgagtggttagtcatgccatttggattaactcatgcacctagtacattcatgaggttgatgaatcatgttctaagagcattcattggaatatttgttatagtttactttgatgacatcttagtttacagcgaaagcttgagagagcatatagagcatttagattctgttttgaatgtccttagaaaggaagaactttatgccaacctaaagaaatgcacattttgcacagataatcttgtgtttttaggctttgttgtgagtgcagatggagttaaggttgacgaagagaaagttaaggctattagagattggccgagtccaaagactgtgggagaagtaaggagtttccatggccttgctggattttataggcgatttttcaaggactttagtaccattgtcgcaccactcaccgaggttatgaagaaggatgtaggattcaagtgggagaaagcacaagaagaagcgtttcagtctctcaaggataaactaaccaatgcacctgttttgatattatctgagtttcttaaaacgtttgagattgagtgtgatgcatcaggtataggtattggagctgttctaatgcaagatcaaaagcttattgcctttttcagtgagaaacttggaggagctacgctaaactacccaacctatgacaaggagttgtacgccttggtccgagctctccaaaggtggcaacactacctatggcctaaggtgttcgtcattcacactgatcatgaatcgctaaaacacttgaagggccaacagaaacttaacaaaagacatgcgaggtgggttgagtttattgagacatttgcctacgtcatcaagtacaaaaaaggtaaggataatgtagttgccgatgcattatcccagaggtacaccctactctctactctcaatgttaagcttatgggttttgaacaaataaaagaagtttatgaaactgaccatgattttcaagaggtttataaagcttgtgagaagtttgcttctggtcgttattttagacaagacaagtttctcttctatgagaaccgtttgtgtgtacctaactgctctctacgagatctatttgtcagggaagctcatggaggtggactaatgggacactttggcattgccaaaacgttggaagtcatgacagaacatttccgttggccacacatgaaatgcgatgttaaaagaatttgtgggagatgtaatacttgtaagcaagccaaatctaagattcaacccaacggtttgtatactcctttacctattcctaaacacccctggaatgatatttcaatggattttgtgatgggattgcctaggacaggaaaggattctatctttgttgtgtattctccttttcaaattgtttatgggttcaaccccatctcaccttttgatctaatccctttgcctttgagtgaaagagtaagtattgatggtaaaaagaaggctgagctagtgcaacagatccatgagaatgcgaggagaaacatagaagaaaagaccaaactctatgctaagcaagctaataaagggagacgagaacaaatcttcgaagttggagatatggtgtggattcacttaagaaaggagaggtttccagctcaaaggaagtccaaactcatgccaagaatagacggtccattcaagataatcaaacggatcaacgacaatgcctaccaactcgatctgcaagatgaaccagatttgaggtcaaatccttttcaagagggaggggatgatatgatcatggatagcattaatgatatggagcatgaaccggagcttgaacgtgagcttgtagccgaggaaggagctaagcttgtagctgaggatgagcttgtagctgaggagaagcttgtagtggaggatgttcttgtcacaccggccgtcccaatgactcgttctagagctaagctattcgaccaagccattgccgggatgcttaaccacattcgggaccgaccaaatgacttgagccaagtcactacctctttagttttgtttcaagctcaaggacctcatcaagatggataa

SEQ ID NO: 2889 - DNA, 1122 bp, Arabidopsis thaliana
  Clone ID: AT_MIF21.C1.o14.tg
atgggttatatgtgtgatttctgtggtgaacaaagatcaatggtgtattgtcgatctgatgcagcgtgtttgtgtctttcgtgtgaccgtaatgttcattctgctaatgctctatcgaaacgtcattcgcggactttggtatgtgagaggtgtaatgcacagccagcttctgtccggtgtagtgatgagagggtttctctatgtcaaaactgtgattggtcaggccatgacggcaagaattctactactacttcacatcataaaaggcaaaccatcaattgttattctggttgtccctcgagtgccgaattatcctcgatatggtctttctgtatggatttgaatatctcttctgctgaagaatccgcttgtgagcaaggaatgggtttgatgactatagatgaagatggcacaggagaaaaatctggtgtccaaaaaattaatgtagaacagcctgaaaccagttcggctgcacaaggtatggatcactctagtgttccagaaaattcatcaatggctaaggagcttggagtatgtgaggatgacttcaatggaaatctcatttcagatgaagtagacttggctcttgagaactatgaagaactctttggttcagccttcaactcatcaagatatctcttcgagcacggtggaattggaagtcttttcgagaaagatgaagctcatgagggctcaatgcagcagccagcattaagcaataatgcatctgcagattcgttcatgacttgtagaaccgagccaataatttgctattcatcaaagccagcacattcgaatatctccttctctggcatcactggagaaagtaatgctggagatttccaagattgtggggcgtcatcgatgaagcagctttcaagggagccacaaccatggtgccatccaacagcacaggacattattgcttcctcacatgcaacaacacgtaataacgctgttatgcgttacaaggaaaagaagaaggctcgcaagtttgacaagcgagtaaggtatgtctctaggaaagaaagggctgatgtgagacggcgtgtgaaaggacggtttgtcaagtccggtgaagcttatgattacgacccgatgagcccaacaagaagctactga

SEQ ID NO: 2890 - DNA, 756 bp, Arabidopsis thaliana
  Clone ID: AT_T13D8.C1.o14.tg
atggctcaagtttgtcacacatgtagacatgtaacagccgtgatccattgtgttacagaagctcttaacttctgccttacatgtgacaaccttcgccatcataataacatacatgcagaacacgtacgttaccaactttgcgataactgctcgatgtatccgtctatacttttctgttatgaggacgggatggttctttgtcaatcatgttattcgcaccattacaattgtgccactaatggccatcaaactcaagtcgtcttcgctaacatgaataatcaacaccatgatcatgcacatatgcctcatgtggttcaccataacaataacaataatcatcagcagcagcatgtgggtggtcaccaaagaagagcagagatgtttgagaggagctgccacggggataacaattgcgagagatggatgtttgcaatgagatgtgagttatgcgtagcttcgaattcaaatgctgttgtttattgtcctacacacaaccagattctatgcgatagttgcgaccggatgattcacagtcacgaggacgcggtgccgccgcattcgaggtgtaagctttgcgtaatctgcaagagaccttctcgccgttttctcattggcggctatcagtttaatttcccaccggttcatcctcctgcggcagaggggattccagttacgcccccaacagaactacctcaacaagatattaattatgattatctagatgatgttgatgatttttcttggtttggtaggtga

SEQ ID NO: 2891 - DNA, 1095 bp, Arabidopsis thaliana
  Clone ID: AT_MEK6.C1.o2.tg
atggagccaaagtgtgaccattgtgcaacctcgcaagcattgatttactgcaaatccgatttggctaaactatgcctaaactgcgacgtccatgtacactctgcgaatcctctgtctcacaggcacatacgctctttgatctgcgagaaatgcttctcacagccagccgcaatccgctgtctcgacgagaaggtttcatactgccaaggatgtcattggcacgaaagcaactgttcggagttaggacacagagttcagagcttgaatcctttctctggttgtccttctcctacagattttaacagaatgtggtcttcaattcttgaacctcctgtctccggcttgcttagtccgttcgttggttcttttcccttgaatgatctcaacaataccatgttcgataccgcttattccatggtaccacacaacatcagttacactcagaatttcagtgataatttgtctttcttttccacggaatctaagggatatcctgatatggttcttaaacttgaagaaggagaagaagatctatgtgaagggcttaacttggatgatgcaccattaaactttgacgtaggagatgatattatcggatgttcatcagaagtacacatagaaccggaccatacggtaccaaattgcctattgattgacaagactaacacatccagctttaccggctccaactttactgtagacaaggctctagaggcatcgccaccaggtcagcaaatgaacatcaacactggacttcagcttcctctatcacctgtcttgttcggacaaatccatccatctcttaacatcactggtgaaaacaatgcagctgattaccaggattgtgggatgtctccagggtttataatgagtgaagcgccatgggaaacgaattttgaagttagttgtccacaagcaagaaacgaggctaagttgagatacaaggagaagaaattaaagcgctcttttgggaaacagattcgatatgcatctcgcaaagcaagagctgacacgaggaaaagagtgaaaggaagatttgtgaaagctggtgacagttatgattatgatccatcatcaccgacgacgaacaattga

SEQ ID NO: 2892 - DNA, 2232 bp, Arabidopsis thaliana
  Clone ID: AT_F25P17.C1.o6.tg
atgcatgaagttggattatttgtggatctgaattccttcacgcagcttatattgacgctcttctttgtctctatcggtcttctctactttgttaaaagaacggcagccaagtacttcgaggtcggtggtggctccggtggtttcgatagagaccatcgccgagatttcatggtttccgacacggctgaatgttctgtctgtgggaaggctactaccaaaaagtgctctcgctgcaaatctgtgagatactggtatgttgaaaagattcaagtttgctccttattagggtttttagattctgatttggacgtagctggagatagaagagtgaacagttttgcttgtgaaagattttggtggatctgttttttgaatttggttctttttttgcctctgttctttggtactagctctgcggcatgccaaacgtcagattggaaatcaggacataaactaaaatgcaaggggtttcggagtactgactcatcaccagtgagaagagatgatatcgatttcgaagcttctctgtttgggaatagatctgcttctaagaagactaggattgcattggttcctcaacagagccaaagcaaagctaccctcaagccaacagatgttcttttcccatacgaaagttttgttagatattataactgggacagaccaataatggctccttgtgggctcaccaattgtggaaacagttgtttcgctaatgtggttctacaatgcctttcctggacacgccctcttgttgcttaccttctggagagaggccacaaaagagaatgtaggcgaaatgattggtgcttcttatgcgaatttgaaaatcatcttgacagagcaaactatagccggtttcctttttcaccaatgaacattatctcgcggctgcctaatattggtggaaatcttgggtatgggagacaggaggatgctcatgagttgatgaggtttgcaattgatatgatgcaatctgtttgcctcgacgaatttggtggagaaaaagtggtgcctcctcgcgcccaagagacaacacttattcaatatatatttggtggtctccttcagtcacaggtccagtgtactgcttgcagtaatgtttctgaccaatatgaaaatatgatggatttaactgttgagatccatggggatgcggtatcattggaggaatgtctcgatcagtttacagctaaagaatggcttcagggagataacttatacaaatgtgatagatgtgatgactatgtgaaagcatgcaagcgcctttcaattcgttgtgctccaaatattcttacaattgccttaaaaagattccagggtgggagattcggtaaactgaacaaaagaattagttttcctgagacatttgatctaggcccttacatgagcggtggaggagaaggatcagatgtatacaaactctacgctgtgattgttcatctagatatgttgaatgcttcatttttcggccattacatatgctatgtcaaggacttccgtggaaactggtatagaatagacgattctgaggtggaaaaggttgaactagaagatgtcctttctcaacgagcatacatgctcctctacagcaggactgtattaagcgaaggagctttaacagattacgatatctggtattggtgcagggttcagcccagaccatcaaatcttagatccgaagaaagtcaagatgagaagaaaacagatacattgaacacagaatctaaccaagatggctctgttgagagttccggggtgggaacaaatgacacaagtgtgtcctcgctgtgtaacggcatcatctcacattcagaagaccctgaatacgaaaaagaatcatcattgtcagcatccgtaccagtctctgaagaaggaaaggaagttgacgtaaaggttgatacagtagattctgaatcaaaccgttctattgacatggaacatgattctggaacagatcatcaagaagaagaagcaaatgggaaagaagatccaacggttgaaaatctggctgttgattcttcttgtttggacattactactccatctccatctgctgctacagagttcatacctcaggagaacgaacgttcagacaccgagtccaaacctctggagaaagaacattcagacaccgagtccaacaaaccgctggagaaagaacatttagacagcgagtccaaacccctggagaaagaacattcagacaccgagatgatcgatgctcaatga

SEQ ID NO: 2893 - DNA, 1011 bp, Arabidopsis thaliana
  Clone ID: AT_MXI22.C1.o17.tg
atgacgcatctcaacaaaaaacagaggttagagaataaccataacaatactgtgaacaaccatttcgaagacttacatgacgatctcatcatctctatcctccgcaaactcgctacctccgcttcttctccttccgatttcctcaccgttctctccacatgcaagagattgaatcggttaggattacatcctctggttttatctaaagccggtactcaaaccctagccgtcacggcggagaaatggtcagattcttctcataaattcctcaaactctgtgttaatgccggaaacatcgacgcttcgtactctctcggaatgatccgattttactgtctacaaaatccagtgagcggcgcgtcattaatggctaaagcggcgattaaatcacacgcgccggcgctttattcgttatcggtgattcagtttaacggaagcggcggttcaaaaaccgataagaatctacgcgccggcgttgctctttgtgcacgctctgcttatttaggccacgtcgatgcgttacgagagcttggtcactgtcttcaagacggttacggtgttcctcgtgacgtctccgaaggtcgtcgtcttttgattcaagctaacgcgcgtgagctcgcgtgttctctacgctcttacctctctctgaaatctggggacgagaacgagaccttaactgatttaagcgtggttccggttcaggagattcatccggttaaccggtttttaaaagagtggtttagttcgggtcgggttgatttagcggaagggttaaggatgtgttcgcatggtggttgtggaaggccggagactcgggctcatgagtttcggcgatgttctgtttgtgggaaggttaattattgctcgcgtggttgtcaggcgttggattggagagcgaagcataaggttgaatgtacgccgttggatttgtgggttgcggcagcggcggagattggcgacgacggtgaagcggtggcggtggagattgatgataatcatggtgagcggtaa

SEQ ID NO: 2894 - DNA, 1140 bp, Arabidopsis thaliana
  Clone ID: AT_F1N21.C1.o16.tg
atgttaccctcaagaaaaactaagagagtcttctcctgtgactttactccgggaagaaaacgccgacgatgtgttgttgttccttcctctgtttctccggtaccggaaaacacaaccggagccgatttgctagattcaattccagacgatcttgttatctctatactttgtaaacttggctctacttctcgatgtcctgctgatttcatcaacgttttgctgacatgtaagagattaaaaggattagctatgaatcctattgtgttgtcgagattatctcctaaagctatcgctgttaaagctcataattggtcggaatattctcaccggtttttaaaaaggtgtgtcgacgccggaagtctcgaagcttgttacactctaggaatgattcggttttattgtttacaaaacagaggaaacggcgcgtcgttaatggctaaagccgcgattagttctcacgcgccggcgttatattccttagcagtgattcagttcaacggaagcggtggttcaaagaatgataaagatcttagagccggtgtggctttatgcgcgcgtgccgcttttcttggacacgtcgacgcgctacgtgagctaggtcactgtcttcaagatggttatggagttcctcaaaacgtctctgaaggtaggaggtttttagttcaagccaacgctcgtgaactcgccgccgttttatcttccggtatacaagctaggtcaacgtggctttctttatcacagccaccacctccggttgttcctaaccatggtcaacaaacttgtcctttgcttagtgattttggatgtaatgtaccggcaccggaaacacatcccgcgaataggtttttagcggattggttcgctgttcgcggcggagattgtcccggagatgggttgagattgtgttcacacgctggttgtggacgaccggagacgaggaagcatgagtttaggagatgttcggtttgtggcgttgttaattattgttcacgcgcttgtcaagctttagattggaaactccggcataaaatggattgtgctccggtgcaacggtggctagaggaaggtgacggtggtgaaggtaacgttcagattgacggaaatggtaacggtgataatgttttgcttccaatgagttaa

SEQ ID NO: 2895 - DNA, 2196 bp, Arabidopsis thaliana
  Clone ID: AT_MNA5.C1.o19.tg
atgatgttggtttttcttctgattcgccggcaatggagatctgcttctgtgagaagagaagaggtgattcgtctcattgctttagccaccgaggaatcttatttggcggaggaagttcgtcccgccactgttgattacggcggagactcggtttctgatgtttaccgttgtgccgtttgtctataccctaccactactcgttgctctcagtgcaaatctgttcgttactgttcaagcaagtgtcaaattcttcactggcgacgaggtcataaggaagaatgtcgatcgcctgattatgatgaagaaaaggaggagtatgttcaatctgattatgatgctaaagagtctaatgtggattttccatctcgtgggactgcgtatgaatcatcatctaatgtgtctgttgatgttgcctgtgatatgtctacaagtaggcctagtattcataaagtgcaacctagatctgaagctgtggatttcactacttctttaaacataaaggataatctctatgagaccaggccactaagtaggaagaaatcacgtaatcgtacagacaaggttgagtcagccagtaattattccaaaggaaagactgatgcaaagctgcggaaacttggcaatcaaaattcacgtaggtcaggtgattcggctaatatgtcaatttcagatcaatttttgtcagttgggtttgaagaagaaatgaatgcacttaaacatgaaagaattacatctgaaccatctagtgcttctgctgcaatgtcttcgtcttcaactcttctcctaccttcaaaagctaacagtaagccaaaagtgtcacaagcttcaagtagtggattgaaaacatcggtgcagaaagttgttcagcattttagacctccacagtcgtccaaaaagtctcaaccttccagttctattgatgagatgagcttctcgtatgagttgtttgtgaaactttattgtgatagagtagaattacagccatttggccttgtgaacttagggaacagttgttatgcaaatgctgtccttcagtgcttggcattcactcggccactgatatcataccttattaggggattacactctaaaacatgtagaaagaagagttggtgttttgtttgtgagtttgaacacttaattttaaaggcaaggggaggagaatctcctctttcacctatcaagatcttatcaaaattacaaaagattgggaagcatcttggccctggaaaagaagaagacgcgcacgagtttttaaggtgtgctgttgatacaatgcaatctgtttttctcaaagaggctcctgcagctggtccgtttgctgaagaaactactttagtaggccttacgtttggtggatatcttcactccaagattaaatgcatggcatgcctccacaaatctgagcgaccggagctgatgatggatctaactgttgagattgatggggatataggaagcctcgaagaagcacttgctcaattcacagcatacgaagtcctagatggagagaaccggtatttctgtggcagatgtaaatcttaccagaaagccaaaaagaaattgatgatattggaaggacccaatattcttactgtcgtgctgaaacgttttcagtctgataactttgggaagctgagcaaacccatccattttcccgagcttctcgatattagcccgtatatgagtgacccaaatcatggggatcatccggtttatagtctctacgcagtggtggtccatttggatgctatgagcactttattttcaggtcattatgtttgctacataaaaacccttgatggagattggttcaaaattgatgacagcaatgttttcccggttcagttagagactgtgttactagaaggagcatacatgcttctttatgcaagggattctccgagaccggtgagcaagaacggtggtcggaaatcaaagcaaagaagaaatttggccgcaattccgtcaagaaagggcaacaagaaacagagagacggtgataataacagtttgttgccgcgtgtggactggtcgagtggaagcctgtcgtcaatgtttagctcatcggacacaacaagctcatgtagcacaaaagactcatcaggtattgagaatttatcagattacctgtttggtggagttgaaccggtttggaaatgggatcgtcataataaatctcaaacgtttgattga

SEQ ID NO: 2896 - DNA, 3027 bp, Arabidopsis thaliana
  Clone ID: AT_F22K18.C1.o240.tg
atgctccttgttttggatctagggatttctagtctagtccttgtggtctctcttgttttacctttgatcggtctctttgttcgtcacaaatggagggtcgctgcccaaagaagggaggagattagaagacttcttattcatgcttctgaagaggctgccagggctgagctagaggcctctgttgagttctcttctgttgccgtctctaatgtcttccattgtcctgtttgctattgtcttgccacgactcgttgctctcgctgcaaagccgttcgatattgttccgggaaatgtcaaatcattcactggcggcaaggtcacaaagatgaatgtcatcctgcttccattgtatatgatagtgaagatgagagtgattccgatttgagattaggagaagaaaatggacaaaatactcctgaggaaactttactggtgggtccagaaccagttactataccaatcggggaatcactattatctaatcgtgccagatctcctgaagatgggaatggagatattgcagataacaaagatgaccttatagataaggaagaagctgtttctgttgctgaaacatctggatcctcgttttctggcttctcctcctccccccgtaatgactctggcgacgagatttctcgttgtgagagcttcagttcatctgaatccgagagatcagagtccctacttgatgctcatgtctctgtagagccagaagacacctgtttcagcaccattgaagatgctccatccaaactgttgtctccaaaatttgtgcacttggttgaatctgtagataatctcgctaatctgcctaaattaagtgtacataaacctgaggatgatgctgggcagaaccagagccaatcaaggagcttacactcattagttacggataggcatccagtatcagctgacccatctctgaagtcatctgatttttggggtacggctcttggatcagccgaacgtgtgagtgattcttgtgttaaatctaaatctggtagacctggtaactcctctctgcatttctcctttggctctggctcctctagagacacctcagctgctaaagtttctgagcagaggagtagcattttaaaagaagctcctagggggactggttatatatctgatggagtaaacttaagagaaagaaatgctaaaagatttgatgaagctgaaattgcattaccaatttcctcttctactgatgcgctgagtcctttggactcttctaatttgtcccatgtgacccttccgaagtcaaagagcgctagtagtgaaaatggctctatgttggcccctttgaaggttggggaagtccaacttttggcatccaaggcctcgaataccaagaagtgtgctgatcttatgaagcattctcctttaggtgcaaaatcggtaagagttcttgatcatcagaaacagaatggtgctgtcgttcagcatataaattctctacatggaagaagtggtttaaaggcatcagtactgaaagttgtagaccagtggaccagaccgaagtctgaaaatgagatggcaggaagacatggtcataaggggctctttccatatgaagtctttgctaaactgtatacatataaaattgagttccagccttgtggcctcatcaacgttggcaatagctgctttgctaatgttgtctttcaatgccttatgttcactcctcctctgacgacatacttcctccagcaatttcattccagagcatgtacaaaaaaagaacagtgcttcacctgtgggtttgagaagctggtcgtaaaggcaaaagaagagaagtctccactgtcccctaatggcttgctatctcagctgcagaatattggaatctttcttgggaatggcaaggaagaagatgcacatgaattccttaggtttgttgtcgatacaatgcagtctgtgtgcattaaggcatctgaatatgatatgaccaagagtagcaaattagaagatacaactcttattggtttgacatttgggggatacctccggtcaaagattaaatgcatgaaatgtcaagtaaaatctgagctgcgtgagaaaatgatggatctaacggttgagattgatggagatattagcaccctggatgatgctttgcgtcgatttacaaggactgagatattggatggagagaacaaatacagatgtggcagctgtaaatcctatgagagagccaaaaagaagctgaaaataacagagcctccgaatgtccttaccattgcactaaaacgattccaggcagggaaattcgggaagctcaataagttgattaggtttccagaaactctagatttggctccatatgtcagtgggggaagtgaaaaatcacatgactacaaactctatggagttattgttcacttggatgtaatgaatgcagcattttctggccattatgtctgctatattagaaaccaaaataagtggtacaaggctgatgatagcacggtagtaacttcggatgtggaaaggatcttgacaaagggagcgtatatgttgttctacgcaaggtgcactccaacgcctccaagattagcagtatgtaccaaaactgaagcatccaataaaaaaagcagagtgccactacctaaggctaatgagaaaagtaccatatcccggtctgtgtctacttcaagtcctgagttgtcttccaacacgcctggtggtggtcgatccggcaatatacagtcattttattctagtttccagaggctgcagaagattttagaagaagactcggcgagtgacagttcatctctctttgacagcaactcagatgaatgctcttgtagcacagacagtacaagcatggacgactttgctgatttcatttttggagatcatcagggacgggctcacggacagtctgagactccctcaccaacatcatcgtcttcctcatcttctccccccttcacaaggcgttcgccgctcagtcgttcttctccagaaacttacggaacctcaagacatcagttgcccttgggaggagaaaggtaa

SEQ ID NO: 2897 - DNA, 1896 bp, Arabidopsis thaliana
  Clone ID: AT_F28M20.C1.o140.tg
atgcatgaggttggttttccgttggatctctctgtcttcactcgccttatagcgactctatttttcctcgccgttggtgttttttactttctcaaaaacaccgccgctaagtacttcgacatcggagccgccgccgccggaggtttcgacagggacttcatggcggttgatgctgaggattgctctgtctgtgggaatttttccaccaagaaatgctcccgctgcaaatccgttcgatactgctcagcagagtgccaaaggtcagattggagttcgggtcatcaaagaaactgcagggattatgggattactacattaacaccatctgcaaagaatggcttaaggttcagagcttctccattcggggatagttctgcgtctagtattgcactgatttccgaacggggccaaaacaagagtagtctcaagccaagagaagttctttttccatatgaagaatttgttgaatattttaactgggacaatccagaattggctccctgtgggctcatgaattgtggaaatagttgtttcgccaatgtgattctacaatgcctttcctggacacgtcctcttgttgcatatctgctggagaaaggccacaagagagaatgtatgcgcaacgattggtgcttcctctgtgaatttcaaacccatgttgagagagcgagtcaaagtcggttccctttttcaccaatgaacattatttcacggttaactaatattggtggaactcttggatatggaagacaggaggatgctcatgagttcatgaggtatgcgattgatatgatgcagtctgtttgccttgatgaattcggtggagaaaaaatagtgcctcctcgttcacaagaaacaacacttattcagtatatatttggaggtctccttcaatcacaggttcaatgtactgtttgcaatcatgtttctgaccaatatgaaaatatgatggatctaatcgttgagatgcatggggatgcggggtctttggaggaatgtcttgatcaatttacagccgaagagtggcttcatggagataatatgtacaaatgtgataggtgtagtgactatgtaaaagcatgtaagcgtcttacgattcgacgcgctccaaatattcttactattgccttaaaaagatatcagggaggaagatacggaaaattgaacaaaagaataagttttcccgagacattggatcttaatccttacatgagtgaaggcggagatggatcagatgtatataaactctatgcagtgattgtccatttagatatgctgaatgcatcattcttcggccattacatatgctacattaaggatttttgcggaaactggtatagaatagatgattccgagatagaaagtgttgaattagaagatgtcctttctcaaagagcttatatgctcctctacagcaggattcaagctcggtcgtcatcttcatgtcttagatcagaagttaaagacgagaagaaaacagacacattggacacagaatcttgcgtaaaagagttagttgagagttcaatggtaggagctattgaaagcagaagcagcacccatgcgaccattgaagaccctgtatgcgagcaatcaccatcaccatcgccatcaccatcaccatcaccatcgccatcaccatcaccatcagtattggcctctgaatgttgtagtgaggttgaaaggattgatacattggattccgagtccaactcttcgattgatgactctgcaacagatcatcaagaggatgtagcaaatgggaacaaagatccagaggtaaaatatcaggctgccgattcttggtcagaccctacaacttcaactccattggtctgtacaaaatccaaacctccggtgagagatatggacaccaagatgatcgacgctcagtga

SEQ ID NO: 2898 - DNA, 2676 bp, Arabidopsis thaliana
  Clone ID: AT_F20D23.C1.o20.tg
atgcttgaaccaaggggagcggacataccaatattgttcctggttttggttgtacttcctgtggtagcttacattttattaggaaaatggagtaacatttctgaaaaaagagtaagggctaacttgctggctcagatggcagctgaagaagctttaagagctgagaccgtggttaatgcggatagaggtgtaagatttgagagtgtggctactgagaatagggctcaaagaaccaggaccaagactgtttctgctggtggtggtgctgtaagagcagagtttgacgctggtgcgagagaaactgtagccgagcagagatctgattccgtgactgctacatgtggggttacagttgtggctcctgtcaataataatgagttacatgtatgtgcaaggtgttttggtcctgctaagacacgttgctcgagatgtaaatctgttagatactgctccgggaagtgtcaaataattcactggagggtagctcacaaagatgaatgtgtcccagtggagtcttgctcttcgtcatctgagagggtttccttcgagaaagattctgttttgtatgaccatggcatggattctacaatgtatagtaacaatactacgcaggcagcaaagggaaagacttcaaaaagctctgtggattttgctagcttgggtatctctcagaatgatattacgccacaaatcaacacgcaagggaggaaaagcgtaggaaaacaacattcttccaaggccaaccgagaatcatgtagaagagacagtgctactgtgtttgattcttctgatgaagctgcttctgctggtggcgataacaagacgagtcacataaaacataagtcgagaggcaacagttatgctgcagaaacaaatcctagaaggcattctgttgacagctctgctgtgcaaatgaatggacaatcttttgtaagtggtatgcaggaaagtcacaaacacgaaaacaatttgggagtcagaagctcttttggttgtccaaacacacaatatccttcaaacgagactgttcggtctaaggatactggcatcagtgaagaaagcaatggcatctcctcaacgatgggaataatgaagatgatgggtttaagaaattctacaaagcatgatgatcgatataagaacctgaaaatgctttttccatacgaggaatttcttaaattctttcagtgtgaagtgtttgatttatcacctagggggcttgtaaattgtggaaacagttgctatgcgaacgctgttttgcaatccttaacatgtacaaaaccactcgttgcttatttgcttcgacgatcacattcaagatcatgttctgggaaagattggtgccttatgtgtgaacttgagcaacatgtaatgatgctaagagaatccggaggtccactttctgctagcagaattctctcacacatgcgaagtataaattgtcagattggtgatgggagtcaggaagatgctcatgagttcttaaggcttttggttgcctctatgcaatccatatgtttggagagacttggaggtgagactaaagtggatccgagactgcaagaaacaaccttagttcaacatatgtttggtggacgtctccgctcaaaggttaaatgcctgaggtgtgatcatgaatcagaaagatacgagaatataatggatctcacattagagatatacggttgggtagaatctcttcaagatgccttgactcagtttactagaccggaagatctcgacggagaaaacatgtatagatgcagcaggtgcgctggatatgttagagcgaggaaagaattgagcattcatgaagcaccaaacattctcacaattgttcttaagcgattccaggaaggaagatacgggaaaataaacaaatgtataagttttcctgaaatgctagacatgattcctttcatgacaagaaccggagacgttcctccgctttatatgctttacgccgtcatagttcacttggatactctcaacgcatctttctcgggtcactacatttcgtatgtcaaagatttgagagggaattggtacagaatcgatgattcagagattcatccagtgccaatgactcaagttatgtcagaaggagcttacatgttgttctacatgagatcgtatccacgtcctcaaagaggagagcacaatggaaaagctccggttcaccattcgcaaccaagaaacgagatgaaggaacagaggaaacctgttaaccgcttcaaaccgagagcggatcacaagaacacagagtcatcatcaagcgaatggtctctcttcacaagctcagacgaggcttctttcaccacagaatcaaccagagactctttcagcaccatagactacacagatgtttgccacgtcgtagactcttcttctcctttcgccatcttcaacaacgtataccacaacgtagagccatcgccacacaacactgtcgcttgcagaatgttctcaggtaccaaacccgaaacccggtatttcgtggagcaagaaacaaatcacaacaacacggtcgtgctggacgcaacaccatcactatatcctattccagcaccgtatccgccccatgattattacgatcagagtatgtatgtaaattacgagactaacccagaatttaacaatggtcaggatcaggatagaacttacagttactggtag

SEQ ID NO: 2899 - DNA, 3567 bp, Arabidopsis thaliana
  Clone ID: AT_F14N23.C1.o5.tg
atgagctttcaagtcaggcgagataggagcgatgataggtctcatcgattcaatcatcagcaaacgtggattcctagaaactcatctacctcgagcgtggtggtaaatgagcctttgcttcctcctaatacagatagaaattctgaaacccttgatgctggttctgcatcccgtcctgtttatctgcaaaggcagcataacgcttctggtcctccgtcctataaccaccaccaaaggagtagtaacattggtccacctccacctaatcaacatagaagatataatgcgcctgataaccagcatcaaaggagtgataacattggtccacctcaacctaatcaacatagaagatataatgcgcctgataaccagcatcaaaggagtgataacagtggtccacctcaaccttatcgacatagaagaaataatgctcctgagaaccagcaccaaaggagtgataacattggtccacctccacctaatcgacaaagaaggaataatgcttctggaactctgccagataatcgccaaagagttgcatctaggacgcggcctgtgaatcaggggaaaagggtagcgaaggaggagaatgttgtgttgacagacccaaacttgcctcaacttgttcaagagttacaggagaagcttgtcaagagttctattgagtgtatgatttgttatgacaaggttgggaggtctgccaatatctggtcatgctccagctgttattccatcttccatatcaactgtatcaagaggtgggctcgagcaccaacttcagttgatttgctagctgagaaaaaccaaggtgataactggagatgtccaggttgccaatctgtacagttgacatcatctaaagagatttcctatcggtgcttttgtggaaagagaagagatccaccgtctgacccatatctcactccacactcatgcggggaaccatgtgggaaaccgctggagaaagagtttgcacctgctgagacgactgaagaggatctttgtcctcatgtatgtgttttgcagtgtcatcctggtccatgtcctccctgtaaagcctttgctccacctcgtagctgtccttgtgggaaaaagatggttactactagatgctccgagcggagatctgatcttgtttgtgggcagcgttgcgataagcttcttagttgcgggcgtcatcaatgtgaaaggacatgtcatgttggcccttgtgatccttgtcaggtactggtaaatgccacatgtttctgcaagaaaaaagtggagactgtcatttgcggtgatatgaatgtgaagggggaattgaaagcagaagatggtgtctattcatgcagttttaactgtgggaagcctcttggatgtggtaatcatttctgttccgaggtatgccatcctggaccttgcggggactgtgacttactgcccagtagagttaagacatgctattgtgggaatacgcgtttagaagaacagatcaggcagagttgcttggacccaattccttcttgttcaaatgtatgtaggaagcttcttccttgtaggttacatacttgcaatgagatgtgccatgcaggtgattgcccgccttgtttagtccaagttaaccagaaatgccggtgtgggtcaacatccagggctgtggaatgctacataacaacttcctcagaggcagagaagtttgtgtgcgctaagccatgtggacgtaagaagaactgtgggagacatagatgtagcgagcgttgctgccctctcttgaacgggaagaagaatgatttatctggcgattgggacccacatgtctgccaaataccttgtcagaagaagctaaggtgtgggcagcattcctgtgaatctttatgtcacagtggacattgccctccttgtctcgagatgatcttcactgatcttacatgtgcttgtggaagaacttcgattcctcctccactatcatgtgggacacctgttcctagctgtcagcttccatgcccgattcctcagccttgtggccattctgatacgcatggatgccattttggagattgtcctccttgttctacccctgtggaaaagaagtgcgttggtggtcatgtggttctcagaaacataccctgtgggttgaaagacattagatgtaccaagatttgtggaaagacgaggcgttgtggcatgcatgcttgtgccagaacttgtcacccggagccttgtgacagcttcaatgaatctgaagcaggtatgcgtgttacgtgtagacagaaatgtggtgctcctagaacagattgcagacacacttgtgcagcactctgccatccttctgcgccttgccctgacctaagatgtgaattttcagtcacaattacttgttcatgtggtcgtataaccgctacggtcccttgtgatgctgggggaagaagtgccaacggttctaatgtttactgtgcggcctatgatgaagcctctgttttacagaagcttccagctccacttcagcctgttgaatcgagcggaaaccgtatccccctcgggcagagaaagctttcgtgtgatgatgagtgtgcgaagctggagcgtaagcgggttcttcaagatgcatttgatataactcccccaaatctggaggcattacatttcagcgagaattctgctatgacagagattatttcagacctttataggcgtgatccaaagtgggtactggctgttgaagagcgctgcaagttcttggtacttgggaaagcaagaggaagcacaagtgcccttaaggtccatatcttctgcccgatgcagaaggataaacgagacacggttcgacttatagctgagaggtggaaacttggtgttagcaacgcagggtgggagccaaaacggtttacagtggttcacgtaacagcaaaatcgaaaccgccaacaaggatcattggagctaggggtggtgctatctcgataggagggccacacccaccgttctatgattcgctggtggatatggatcctggacttgtggtttcttttctggatcttccgagagaggcgaatatcagcgccttggtactgagatttgggggtgaatgtgagcttgtttggctgaatgacaagaatgctttagcggtgttccacgaccatgcccgagctgccactgccatgaggaggcttgagcacggttcagtatatcatggagctgtggttgtccagagcggcgggcaatctccatcacttaataatgtatggggaaaattacctggcagctcggcgtgggatgttgacaaaggaaatccatggaggagagctgtgattcaggagagtgatgactcctggggagctgaagattcccccattggaggatcatctacagatgctcaagcctctgcgctgagatcagcaaagagcaactctccaattgttacctcggttaaccgttggagtgttttagagcccaagaaggccagcacatccactttggagccaattgctcagatagaagagagcagtagttcaaaaactaccggtaaacaaccggtggaaggctccggtgaagaagtggtggatgactgggagaaggtatgtgagtga

SEQ ID NO: 2900 - DNA, 2427 bp, Arabidopsis thaliana
  Clone ID: AT_YUP8H12.C1.o24.tg
atggcgactagaggaagcagatcggagaaagttaagagaattttccagcaattcgacgggaatcatgatggtgggcttaaccgtgaagagatggcggctcttgtcgtagctgttaaccctagggttaaattcagtgacgagcagatcaacgccattctcgatgaagtttttcgaacttacgctgaattcatcgatccaaacaagggtttgacctacgacggtctcctacgtacttacgacgacggtgccggagatgttgacagagatttcgacgcattggggcttgagttaaacgctgatgagacgacgattaaagggtctgaggcggcttcgtcttcttcgattactgatgagagagctgttgaagcgcagaagaaacagagaacagctgcttgggctgtttcgccgaatcacggaatcgtttttgacgagacgtggaagttagttgatgatttggagattctggtgaagagattgaagtcgaaacaggagaaagatggaaaattgaaagctgataataacaataacaatgttgatgcgttttctgatgctggatggtctagagagttaggtccgtcttctgagatctctgagaagagaatctattgggaagaatcgagtcatgattatggagtgtttgtgaaggaattaggtgttttgagaagtaaagctgatggagctaggtctagagaagaagcttttgatggacatatggctattggtagggttttatatgagcatcagttgtttaaagaagctcttgttagcttcaagagagcttgtgaattgcaaccgactgatgtgagacctcatttcaaagctgggaactgtctttacgttttggggaaatgcaaagagtcgaaagatgagtttttgttggcgttggaagctgctgagtcgggcgggaaccaatgggcttatttgcttcctcagatttatgtcaatctcggtatcgcgcttgaaggcgaaggtatggttttgagtgcttgtgagtattatagagaagctgcgattctatgtcctacgcattttagagccttgaagcttctaggtagtgcgttgttcggtgtaggagagtatagagcagcggttaaggccttagaggaagctatatacttgaaaccggattacgcagatgctcattgtgatttagcttcgtctttgcattcaatgggtgaagatgagagagctatcgaggttttccagagagctatagacttgaaacctggccatgttgatgctctgtataatcttggtgggctttacatggatttaggtaggtttcagagagcttcggagatgtacactagggtcttaacggtatggcctaaccattggcgtgctcagcttaacaaggcggtttctttgttaggtgctggagagaccgaagaagctaaacgagcgcttaaggaagcactcaaactgacaaaccgggttgaattgcatgatgcaatatctcatttgaaacatttgcagaagaaaaagggtaaaaacaatggaaatggtaatggtggagaaggtccgttcatcgtcgtggaaccttccaagttcaagactgtgggtgagaagacgactttgaggccggatttagccacagcccttcaaattagagcctttcagagggttacaaggcttgggaaatgcgatgtggaggctgtacgaaaggagatgagagacaatgatgttcctgtatcgtattccggtagtggtggaccgacgaaatctattcggaaacctaatttagaggagattctacggcgtctgctcagctccttgaaacctgacacttttcaaggagccatcaaggctataaacgagaaaatcctcgcgcttctcgatgattcagggtcgggaagagttgatatgggtatgttttacgctgtgattgctcctttatgcggtggacattccgacaaaaggaaaagagttgcttttgatgcgcttctttggagacctgtaaacgaaggaagctctcagattacaaaaacggatgcagtcaaatacattaaactgttgagagctatttacattccatcacatggaatgagtgaaatgttagaagttcacggagaagaagaagctgaatcctcagtgacagtgacatttaatcagtttttagccatgttcgacgatccagattggggatttggtataatgtctacgatccttaaactggaggcaaacgatagaaaccgtcatggaaaccaagtttgctcggtttgtcggtacccggtaatcggatcccggtttaaggaagtgaaagcccggtttagtttgtgtaaccagtgttacggtgaagggaaggttcctccttcgtttaaacaagaggaatacaagttccgagaatatgagagtgaagctgaagccatgaaagctaagtgtgtatgtttctcgatgcaatctcataaaaaagcgattgccacttga

SEQ ID NO: 2901 - DNA, 2409 bp, Arabidopsis thaliana
  Clone ID: AT_T32F6.C1.o3.tg
atgacgacgagaggaagcagatcggagaaagtcaagagaattttccagcaattcgacgggaatctcgacggaggattaagccgtgaagagatgtcagctctcgtcgtagctgtgaaccctagggttaaattcagcgacgaacagataagcgcaattctcgatgaagtgtttcgaacctacgctgaattcatcgacggagataaaggtttgacctttgacggtcttctccgaacttacgacgacggtgctggagatgttgatcgtgatttcgacgctttagggattgagtttaacgaagagacaaagggtgcctctgaagcttcgtcatcttcgattactgatgagagagctgttgaagcgcagaagcagcagagaacggcagcttgggcggtttcgccgaaccatggtattgttttcgatgagacgtggaagcttgttgatgatttggagattttggttaagagattgaagtctaagcaggagaaagatgggaaattgaaagtggataataataatgttgatgcgttttctgaagctggatggtctagagagttaggaccgtcttcggatatttcggataagagaatctattgggaagaatcgagtcatgattatggagtgtttgtgaaggaattaggtgtgttgagaagtaaagcagatggtgctagatcaagagaagaagcttttgatggacatatggcgattggtaaggttttgtatgagcaccagttgtttaaagaagctcttgttagttttaagagagcttgtgagttgcaaccgactgatgtgagacctcatttcaaagctgggaattgtctttatgtattggggaagtataaagagtcgaaagacgagttcttgttggcgttggaagctgcggagtctggtgggaatcaatgggcttacttgcttcctcagatttatgtcaatcttggtatctctcttgaaggtgaaggtatggttttgagtgcttgtgagtattatagagaggctgcgattctttgtccaacgcattacagagccttgaagcttctaggtagtgctctgtttggtgtaggagagtatagagctgctgtgaaggctttagaggaagctatatatttgaaaccggattatgctgatgcgcattgtgatttggcttcgtcgcttcatgcaatgggggaggatgagagggctattgaggttttccagagagctatagatttgaaacctggtcatgttgatgctctttataacctcggtgggctttacatggatttgggtaggtttcaaagagcttcagagatgtacactagagttttagcggtgtggcctaaccattggcgtgcacaactcaacaaggctgtgtccttgttgggtgctggagagaccgaagaagctaaaagggctttaaaggaggccctgaaaatgactaaccgagttgagttgcacgatgcggtatctcatctgaaacagttgcagaagaagaaaaaggtcaaaaaaggaaatagtgctaacgaagaaggtccgtttattgttgtggaatcttccaaattcaagacggtaggcgagaagactactttaaggccagatttagccatagctcttcaagttagagccttccagagagtcacaaggctgtggaaatgcgatgttgaagcattaagaagagagatgagagacaacaatgttcctgtatcctattccggcaatggaattcccacaaaatctataaggagaccaaacttagaagagattctccggcgtctgcttaatgtcctgaaacctgaaactttccaaggagctattaaggccataaacgagaaaatcctctcggttcttgatgattcagggtcgggaagagtcgatttgggaatgttttacgcagtgattgctcctttatgcggtggccatccagacaaaaggaaaagagttgcatttgatgcgctactttggaaaccggtaaacgaaggaagctctcagattacaaaaatggaagccgtcaaatacatcaaactcttgagagctatctacataccatcacaaggaatgagtgaaatgttagaagttcatggagaaagcgatgatacttcgacggtaacattcaaccagtttctagagatgtacgatgattcagagtggggatttggtatcatgtcgactgtttttaaactcgaaacaagagataggaatcgacacgggaaccaggtttgttcagtttgccgatatccgattatcgggtctcggtttaaggaagtgaaaacagggtttagcctctgtaaccaatgttacagcgaagggaagattcctccaacgtttaaacagcaggaggaatataaattcagagagtatgcgagtgaagtggaagccatgaaagctaagtgtgtttgtttttcaatgcaatctcataaaaaaacaatagccacttga

SEQ ID NO: 2902 - DNA, 705 bp, Arabidopsis thaliana
  Clone ID: AT_MNF13.C1.o110.tg
atgtcttcacgacaatcggtgaggcacccgagtcacaaccatccattgcgcggtcacaaatgcgaagccaaagacgaaatcatctgctccggttgtgatctcgatctggttggtgcagctttcaaatgcacaaagtcatcagattgtgattacttcttgcacaagtcatgttttgaacttccacgtgaaaccaaccacaaatctcaccaaccccacactttgactttaatctattccccaaagtcaacgtacacgtgtaatgcttgcggcgaatacggatcaagtttcacgtacaactgttcaatctgtcagtacgatgtacatgtcggatgtgtttcaatgcctgaaacagtgaagcgtgaagatcacccacatccacttactcttctttacggttctccttataaccaacccggtttagtttccaaatgcgatgtttgtgaagacattgtaccggataatctctggtcgtattattgcaaggaatgtgattacgctacgcatttacactcatgtaagaaagaggaagaggcaaagaaagaagatcaaaaaggagaaggaagtaaaaactcgatgaattcggagttagctgcaatgttagaggctcaaagagaagtggagaggatgcagattgagatgcatttggcgatgcaaagtgctttgatttcgaaaaaggcgaataaggcagctctcaattgcatctaa

SEQ ID NO: 2903 - DNA, 1959 bp, Arabidopsis thaliana
  Clone ID: AT_MMM17.C1.o20.tg
atggagatagatcatgaacttttaatcccacatttaatgatggaggaaccaactgtgaaagaagaagacataattcacaaccaaaccagtactaaagaaatgtatgatgcagaaaaaccaagatgccttctgtctcatccagctgactctcctcacaacctgtccgttggatgcgatcccaaacttccgcttggctgctttacgtgcggcggaaaaacaactgtgcggcggcaagattatctccacttccactgcaccacctgcgacgtaaagttccacgaaggttgtcaaacgcgtccgagaaggataacacatccttatcacctccaacaccctctcactctcttctatcgaaaccctgaaaccggaattatatccaacatcatcccctactccagcccttacgaatccgacacatctgatccagaatccaactcatctggtgaagggaagtctgaacttgtcgatattattccgtccaaatccgatatcatttttgacaagtgcacttggtgtggaaaagatttcaaaggtgatgtttggttctaccgttgtttgatatgtggcttttgtttggatctctcttgtgccttaactcttccacctcttactattgcaaatccgaaaagccatcatcactcactcctcttcttacctcggcctttattagttccatgtgatgcttgtgggttggtcaacgcgttggaaccaagttatgcttgttttcaatgtaattacatgatccatcagaattgcatagatctacctcgagtcataaagatcacgcgtcaccatcaccgtctttcttttactcctttcgggccacctctgatttctttatgccgggtttgctacaaagaggttgatatcaagtatgggcaatattcttgccagcacgaagattgttcttatgtagctcattctaaatgtgcaacacataaaaatgtttgggatgggacggaactcgagtgggaaacagaagagtccgatgaaaatgaagatattgcgccattcaaggtggtcggtgaagatttgataaagcatttttgtcataaacatcacctacggctcaagaagcacgatggttttcgagaagcagagaagcaatgtagagcgtgtgtatttccaatcgtctctcatcaattctatcattgcaagatatgcaattactctctccacgaggtatgtgctggtcttcctcgaaaacttgatcatgcattgcacaaacaccgtcttgtcctagacccatctccgctacatgactacagaaacatgcattgttcaacttgttcgcgagcgttcacgggtttcagatacaaatgctcagaaaagatttgccaagaccgcacaaatctcaatatagatgttagctgcattttggttcccgagtatttcacacataaaagtcatgaacatcccgttgtcatctccacatcctatagcgacacagatgagatcctctgtaatgcttgtcaggggacatgttggcaacctcatataaagtgtactaaatgcgattttgctatgtgttatacatgtgctaccattccaaacgaagtacactacaaattcgatgagcatcctcttacattatgccacggagaaagcagaaagagcaagtactggtgcgaagtgtgtgagaaaaaactagatacaacaaaatggttctacacatgcaacaaatgctgcactactgtccaccgtgaatgcttattcgggtcaactgtttatatgcagcctggttccagattcaactacgtatacggaacggtggaagttttccgcaacagtcataacagtcgactggtttgtcgtaaatgttttcattcgtgcacagattccgtctacttcagaggctacaagtcccaacagacgtttatttcatacaaaggctacgagcagcatgagatggctatttgttctttgacctgtttaaaactagagatgctcttctggtag

SEQ ID NO: 2904 - DNA, 504 bp, Arabidopsis thaliana
  Clone ID: AT_F7H1.C1.o7.tg
atgaaatacgcagatatatcacattttagtcaccctcaacacaacctcaaattcgactacacggagaaacccttcaaatgtgatggatgcaatgaagttggtatcggctctcgctatcgctgctccggtgataatcatggaagctgtgattttgatctccatgcgcactgtgccctgccctcagcgtccataacacatccgttctacaaaaagtgtacgtttcagtttgtggcgcggccaccagggaacgaaagacggtactgcaatgcgtgcgagaaggatgtatcggggtttttgtaccattgcaaggcttgtgggtttgatcttcacccgtgttgcgctatgcttcctatggttttggacgatggagagaccaatctctttctttatcgtaaagttagttcgtcttgtcatcgatgtggaaaaaaaggccgtagctggagttacaggtctctcttcttgattctcttcttgttctttcattattatgataccaaagattag

SEQ ID NO: 2905 - DNA, 2115 bp, Arabidopsis thaliana
  Clone ID: AT_F22K18.C1.o110.tg
atggagtctactgctaacgcactcgtcgtcaaggtgagctatggaggtgtgcttaggcgtttcagggtgcctgttaaagctaatggacagcttgatcttgaaatggctggtcttaaggaaaagatcgctgctctctttaacctctctgcggatgctgaattgagtctgacttactctgatgaggatggggatgtggttgcccttgttgatgacaacgatctctttgatgttactaatcagcgtcttaagttcttaaagatcaatgtgaacgctggcgtgtccactaactctgctgctccagagagtagtgggagttccacacctgcgggtatgcctaacccggtttccaaaatccagaagggtataaatgatgttctgatggctgtacctaacccgatgcgtgataccatatcaaaggtgtacatggaccttgcatccaaggcctcaacttctagtcctgtagttggtgagatgcttgattgcatttccaagctagggcagctctcaattcctcaggaaagtagtccttgctcacctgttaccaagcctggttcttcaggtgcttccctgagcagggatgttccttccgctggtggaaagaaggatatctctgagaggacccagaccggaaggaaacctgttaatctgaatgaacccactggcgctcattcaaagacttctggtcatgtaccaaactcgtctggactgggtgctaatttcaacgagtgtccctttagtggcagtaccatgaattactcctgtccaaatccagttaacctcaacaagcatcctcgtcgtgtttgtcattccaaaaagagcaccaatggtgattactggacttcattgggtgtattccataagggcatccgttgtgacggatgtggagttcttccaattactgggcctagatttaagtcgaaagttaaagaagactatgatctgtgcaccatctgctattcggtgatgggtaacgagggggattacacaagaatggataagcctgtatccgttcaacatctgcatccttttagaggaccgtttacccaatttcctaatccttggttgagccaccctgtgccacgagcaaccaatggaggtgcacctctcaggtgtactcgccctaaactagacagtcggtttgtccttgatgtgaatgtaattgatggaaccgttgttgctccatccgccccatttactaagatttggaaaatgaggaacagtggttcgctggtgtggccacagggcacacagattgtctggatcggtggggacaggttctgcaactccttgtcagttgatttacagattccaaaggagggtgtgcctatctatagtgaacttgacgtcaaagttgattttgttgcaccagagttacctggtcgatacatttcttattggaggatggctacctctgacggtgctaagtttgggcaacgtgtttgggtgttgatacatgttgatgcatctctgaagaattctgttgtgaatgagtttcatggactgaaccttaatgcctccccctcccttgatgagaattttccaagcgaatttctagggattatgaattatgagtcagctcaacctggcagctccagtgtcaatcctgggaccgtgaaaggtactgatctagagggcgaagttggtgaaacacaggccgtggaaaaagaaaaccttttggttggtgaagctcatcctgctatccctcacggtcattctccttcatcttcatcttcttcatttaacatggtcgacttcccaagcatgcctgctgttgaggtcttgtctggtggttcttcatctactacaaaagacgtgccagttcctcttcaggaggatatagaaaagaatgacgtggagataaccatgctcaaggagctcgaggaaatgggtttcaaggagatagatttgaacaaggagatcttgagggataacgagtacaacctggagcagtctgttgatgctctttgtggagttagcgagtgggatccaatcctagaggagcttcaggagatgggcttctgtgatgatgtgacgaacaagagactgctgaagaagaacaatggaagcatcaaaggcgtggtaatggatctcctcacaggggagaaggaggcttga

SEQ ID NO: 2906 - DNA, 15240 bp, Arabidopsis thaliana
  Clone ID: AT_F14P3.C1.o9.tg
atggcagatgacttggcgaatctctgccgatttctcttcgacgacaccgcctttccctctttgtcgtcttcggcatcttcagatctcttttctcgccgtttacgctccgatgattcgatcaagcgcggtctccgttctttctatctcctccttcgctggggtgtcgctccgatcggcggagacgatgctgattcctctggcaagctacgctttgagacatggtccgattcgcagcttcaagctcttgtttcgatatctcaggcgatccttctactatctcgatctctattaggtactgacttgacactgaatcaaggtttagtggaccaactcgaaccaatcgttttgggtgtcatccaggaggtgatggaattctctctcagcttcttggagaagtcaagttttagacaaaatgatctcaaaatggagatcaacatggaaatacttttggaaattgcttcttttgatggaagtgagaagcaatatgatatattaccagatttctctcccgctgaagttgcagaactgtggccagctttttctggcgagcatgataatatggacgcacagagccttgtgaaatgtacttttcaagggggcagatgctcaaatgaagagaagccagttgaccggcttcttattacactgatgtctgaatgcattgaatctgatgtccaggcgcagtcagtagtaaagtccccttttcaacaagactgtggagacctgaatccctttactcgacacctggcagttgttcaccttcgctgtgtttgtcgcctgattatggtctgcaaagagcttgttcaattgccaaatatgttggatgagaagacggttgatcaagctgtccttgataaattgtcgttctgcttaagaattttgaagctgcttgggagtctttcaaaagatgttcaaagtatagaaaacgacggctcattgttacaagcagtagcttcatttacagatgcttttcctaagctgtttagggttttctttgaattcactaaccacactgctacagagggtaatattgagagtctttctcttgcgctagtggagggatttcttaatctcgtccaactcatttttggcaagagcagtgtttttcagaatgtccaggcatgtgtggcagcttctattgtcagcaatctagattcctcagtgtggagatatgatgggtcctcttgtaatttgacacctccacttgcttacttccctcggtctgtcatctacacattgaaactcattcaagatctcaagagacaaccataccatatccatgatctgagggttttagagtctgaagttacctatgaagatgtcagttccactgttgattctgtttatttccatctgcgccaggaaaagatcccgttgctcaagtgcttcacggtcgaggatataatgagagtgatatttccttcatcaagtcaatggatggataacttcttccatcttgtttatttcctccatcgcgaaggtgtaaaattacgaccaaaagtggagaggacgtattccagtttaagatccaacagttttgcagaagttgaaagccaaatttctcatgacgatgaagccctgtttggaaacttattttctgagggtagtcgttctctctgttccatagaaccaaatgatcaaccacctgtttctgtcagcagcaatttactattgcaagctgctaaggaactgttgaattttcttagagcatgcattctttgtcaagaatgggttcctagtatatatgaagatggatgtaaaaagcttgacactggtcacattgatatcctgctcaatatagtaggctgtagtattgaagacaaggcttctgatggtggttgcatgctccaagatgagggaagacctggacatgttgcttttgagctgttactcaatctcttgagaagtcgtgctctgtctgattttctagagtcctacctttttcagcaaattcttgttgttgaaaatagtgacttcaactataatgataagactctggcactgttggctcacactcttctatgtaggccgggcttggctggggcacagttgagagccaaaatttatgatggtttcgttagttttgttaccgagagagcaagaggtatatgtgctgaagctttgagtctcaaggagttgactgcttgtcttccttctgctttccatattgagattcttcttatggctttccatttatcaaatgaagctgagaaggcaaaattctcaaatctcattgcttcatgtctgcataaagttgataccccggcaggaatatgtgatggtcctcagctgtcctcttgggcaatgctgatatctaggttgttagtgctgttgcaccatatgttgttacatccaaacacatgcccaacatcattaatgctagatctaaggtctaaactgagggaagttcgtagctgtggtagtaatttacatgtaactgttggtgatcatttatcttcgtgggcgtctcttgtagcaaggggtataactgattcatgggctgaggatgagtcagtcagccatctaatgagtcaaatgattgacttttcccctcatcctcctacatttcagaatgatgtgtctactgccaaaaccttaaacttggattatggagatttatctgcgagtttgtgtcgggttttggggctgtggaaggggaaaaaggcaggaaaagtggaagacctgctagtggaaagatacattttcatgctttcttcagatattgctcgtattaactgtgcattggatagccagccttctttgcatgttaattaccagaatgtggacatatctaactctgtggatctcatcagcaccagtcatttgcttgtaggcgacatcaatgttgttggtagaaatatcgagttgagaaacattctgatcggtgttttaaatcagctccaggcagcacctgagcaggtggttgaggatttgggttgggattatattcgcgaaggagcttggctctctcttctgttgtactttcttgatggtggcgtctgggattattgcaacaaaaattcatgttcagaaatcgatcccttctggaaggagtgcacatctgttgacgccaagtatgttgctgcagcagaaggggtagtctcttacttgatgaagactggtgatattgcagaattgctgagaatgctttcatcattggttggcaaatatttacgagtgtataagaaagctttccttgcaactttcagcgattggaatcatcacggtcatagttcgccttctctgctacttctcaagcatactcaatttggtaaaagtctccaaggtgaatatgcgaagattggtgacaattctctccatcttcaatgcatcttttatctgtcaaaactggattccctgggagatggaagaggttcgggtgttttatggaaagtgttttgggaatttatggtacatgggtttcccactagtcttcaaacttctagtgcgattcttctttcatgtattctaagcataagatgcattgtgctgacaataaatggcttactcaaactgggtaactctaaggagaagtttggggtagatactagtgtacttcatcagctacttgattctatcatgattattaagtttgaccaggtattcgaaagctttcatgggaaatgtgaggagatccatcaaaatatatgtgccgtgttgcagcttccagatttgactgagttgtttctgatgaaagacatggaggggtttgtaagagatatcagtgctgagcagatagatagaagccaagtgcttgaaggggtgatcaccaagattgtagatgttatggacagtctaagcaaggattcttcgaaatctgatattttcaaattttatcttggtgtagatgcagtctctgagcataccagggaattttatgagttgcaacgtggagatctgtctgtgtttattgactcattggactactgttccttggaaccagtaaacataaaagtacttaacttccttgttgaccttttgtctgtggctcaatcccctgatctccggagaagagtacaacaaaaatttattgacatggatttgatatctttgtctgggtggctggagagaagactgttgggttccttcgttgaagaaatagatgggaaaaagactgcaaaaggaaattctcttcctttcagagaggcagcaatgaattttattaattgtcttgtgtcatctactaacgacctacagaccagagagttacagaatcatttattcgaggccttgctgatctccctcgataccgcgtttctctcatttgatatccatatgtctatgtcatattttcattttgttcttcaacttgcaagggaagacaacctgatgaagatggttttaaagagaaccataatgctgatggagaagcttgctgccgaggagaagttgcttcctggtttgaagtttatttttggtgtgataggcaccttgttgagcaaccgttctccaagtcatggagagagtttgtgtggaaagtccttggcaagctataagaatactgcaacaggtcctttggtcccaaaactttcaggaacaacgaaaaaatctgatacattggctctccccgtggatcaggaaggaagctcaatatcacttgaatgcgatgtcacttctgttgatgaagatgaagatgatggaacatctgatggtgaagtggccagcttagacaaggaagatgaagaagatgccaacagtgagaggtaccttgcctcaaaagtctgcacttttacgtccagtggcagtaatttcatggaacaacactggtatttttgttacacttgtgaccttactgtgtccaaaggttgctgttctgtttgcgcgaaagtttgccaccggggtcaccgtgttgtctattcacgatcgagtcggtttttctgtgactgtggagctggaggtgttaggggaagcagctgccagtgcctgaagccacgcaaatataatggaaatggaagtgctccagctcgtggtacaaataatttccaatcgtttttacccttgtctgaggatgcagatcagcttggagaaagcgattcggatgtggaagaagatggtttcggggaggaaaatcacgttgtcttatatatccctaaagaaactcaatataagatgtcactgctactcgaagagctcgggatagaggaccgagtactggagcttttctcatctttacttccgtctatcactagcaaaagagactctggcctgtcgaaagagaagcaggtcaatctcgggaaagacaaagttctttcatttgacacggatcttttgcagctgaaaaaagcatataaaagtgggtcattggacttaaaaataaaggctgattatactaattcaaaggaccttaaatctcttttagccaatggttcccttgtcaagtctctcctgagtgttagtgttcggggtcgccttgcagttggagaaggtgataaagttgctatatttgatgttggacagctaataggacaagccacaattgcacccataaatgcagacaaggccaacgttaaaccactttcaaggaatattgttcgttttgagattgtgcatctttcattcaacccagttgtggagaattatcttgctgtcgcaggccttgaagattgccagatacttactttgaatcatcgaggtgaagtcatcgacaggcttgctgttgagcttgccctgcaaggtgcattcatcaggcgtatagactgggttcctggttcacaggttcagttaatggtcgttacgaacaaattcgtgaagatttatgatctatcccaggatagcatcagtccaacacagtacttcactttgccaaacgacatgattgtggatgctactctttttgttgcttctcgtgggagggttttccttcttgttctttcagaacaagggaatttgtataggttcgaactatcttggggcggcaatgcaggcgcaacaccgcttaaggaaatcgttcagattatgggaaaggatgttacgggaaagggttcatctgtctatttctctccaacatatcgactgcttttcatatcctatcatgatggaagttcttttatgggtcgactcagctcagatgcaacatccttaactgatacatctggcatgtttgaggaagaatcagattgtaaacaaagggtggctggattgcatcgttggaaagagttgttggctggcagtggattatttatttgcttctccagcgtgaagtcaaatgctgtcttagctgtgtccttgaggggcgatggggtatgtgcacagaatctccgtcatccgacaggatcatcttcccctatggttggaataaccgcatacaaacctttgtcaaaagacaatgttcactgtctagttctgcatgatgatggcagccttcagatttattctcatgttcgtagtggagttgatactgactcaaatttcacagctgaaaaagttaaaaagttgggttctaagatacttaacaacaaaacctatgctggtgcaaagccagagtttcccctggatttctttgagagggcattttgcattacagcagatgtgagacttggtagtgatgctattagaaatggtgattccgagggagcaaaacagagcttggcatctgaggatggctttattgagagccccagtcccgtgggcttcaagatatctgtctccaatccaaaccctgacattgttatggttggcatccggatgcatgtgggtactacatcagcaagctctataccttcagaagtgaccattttccagagatcgattaagatggatgagggcatgaggtgctggtatgacatcccatttactgtggctgagtcacttctagctgatgaagatgttgtaatctctgtggggccgactactagtgggactgcactgcccagaatagactcgcttgaagtatatggtcgagctaaagatgaatttggctggaaagaaaaaatggatgctgtgctagatatggaagctcgtgtgcttggtcatggtttgcttcttccaggctctagtaaaaagagagcgttggcacagtctgcttcaatggaagagcaagttatcgctgatggtcttaagctcctatcaatctattattcagtttgtaggccacggcaagaagtagtgcttagcgaactcaaatgcaaacagctactagagacgattttcgaaagtgatagggaaaccctattacaaacgacagcttgccgtgttttgcagtctgtctttccaagaaaggagatatactaccaggtaatgtttctaccaaattcagtcaaagacaccatgcgactccttggagtggtcaaggtgacctccattctttcttcgaggttggggattttgggtactggaggttcgattgttgaagagttcaatgctcagatgcgggcggtgtctaaagtagctttgacccgtaaatcaaatttctccgtctttctggagatgaatggctctgaagtggttgataatctgatgcaagtgctatggggaattttggagtcagagccactcgacacacctactatgaacaatgtcgtgatgtcctccgttgaactaatctatagctatgcagagtgtttggcatctcaaggaaaggatacaggggttcattctgtagctcctgcagttcagttactgaaagcacttatgttgtttcccaatgagtctgtgcaaacatccagcaggtgtgttcttgtcctagctatatcatcaaggttacttcaggttcctttcccaaagcaaacaatgttgacaacagatgatttggttgacaatgttacaactccttcggtgcctatcagaacagctggtggaaatacacatgtcatgattgaggaggactctataacttcatctgttcaatactgctgtgatggctgctccaccgtccctatactgagaagaaggtggcactgcactgtttgtccagattttgatctatgtgaggcatgctatgaagtgttagatgcagatcgtctaccaccaccacacactcgagatcatcctatgacagcaattccaatagaagtggaatcacttggtgcagacaccaatgagattcagttctctgcggatgaagtaggtatttcaaatatgttgccggtggtaaccagtagcattccacaagcttcaactccctccatccatgtcttggaacctggtgaatctgctgagttctctgcctcactgaccgatcctatttctatctcagcgtcaaagcgtgccgtaaattctttgattctctctgagtttctccaagagttgagtggatggatggaaacagtatccggtgttcaagctattcctgtgatgcaattgttctacagattatcatctgccattggtggagcctttatggatagctcaaagcccgaagaaataagcttggataagttaattaaatggcttttgggtgaaatcaatctcagcaagccgtttgctgcttcaactcgctcttccttaggggaaattgtgattcttgtgtttatgtttttcaccttgatgcttcggagttggcaccagcctggtagtgatggtagtagctccaaattaggtggaagtacagatgtacatgaccggaggattgtccagagctccactgtagtagctactcagtcttctttacatgttcaagagagagatgactttgcatctcagctagttcgtgcgtgcagttgcctcaggaaccaagagtttgttaattatctgatgaacatacttcaacagctagtgcatgtttttaagtcacgtgctgccaatgttgaagctcgtggatcaagctctggttctggttgtggagccatgctcacagtcagaagagatttacctgcgggtaactattctcccttcttttcggattcatatgcaaaagcccatagagcagatatttttgtggactatcacaggctgctacttgagaatgtgtttcgcttagtatataccttagttagacctgaaaaacaagagaaaatgggggaaaaggaaaaggtatacaggaatgcttcttctaaagatttaaagctggacggtttccaggatgttctatgcagctatataaataaccctcatacggcttttgttaggagatatgctagaaggctgtttttgcatctttgcggaagcaaaactcaatactacagtgtcagagattcatggcagttttccaatgaagtgaaaaacctatacaagcatgttgaaaagtctggtggttttgaaaacaatgtttcatatgaaagaagtgtaaagattgtgaagtcgctttctacaattgctgaagttgctgtggcaagacctcggaactggcagaagtactgtctcaggcatggagattttctgtccttcctactgaatggtgtattccattttgcggaagagtctgtaatccagacacttaaactcctcaatttggccttttatcaaggaaaagatgtgagcagctcagtgcagaaagctgaagcaactgaagtagtgacaggctcaaaccggtcaggatctcagtcagtggattcaaaaaagaagaaaaaaggtgaagatgggcatgattcgggtttggaaaaattatatgtggatatggaaggggtggtcgatatcttcagtgccaattgcggagatctcttgaggcagtttattgatttctttctgctggaatggaattcgagctctgttcgcactgaagcaaaatctgttatttatggcttgtggcatcatggaagacactcgttcaaagaaagtctgttagcagctcttttgcagaaggttagatacctgccagcatatggtcagaatattgttgagtacacagaacttgtctccttgttgcttgacaaggctccagaaaacaactcaaagcaagcaattaatgagcttgtggatcggtgcctgaaccctgatgtgataaggtgcttttttgagacgctgcattcccagaacgaactcattgccaatcatccaaactcccgtatatacagcactctgggtaatcttgtggaatttgatggttattatcttgagagcgaaccttgtgttgcctgcagttctcctgatgtgccatatagcaaaatgaagcttgaaagtttgaaatccgagacaaagtttactgataaccgcatcattgtgaaatgtactgggagttatacgatacagtctgtgacaatgaatgttcatgatgcacgaaagtcaaagtcggtgaaggtcctaaacttgtattacaacaatcgccctgtctcggatttatcagagcttaaaaacaactggtcactgtggaagcgtgccaaaagttgtcatctgtcttttaaccaaactgaactgaaggtggaatttcctattcctattactgcttgtaacttcatgatcgagttggattctttctatgagaatcttcaggcgttatctcttgaaccattgcaatgtcctcgatgcagccgacctgtcactgataaacatggtatttgcagcaactgccatgagaatgcttatcagtgcaggcaatgccgtaacattaattatgaaaatttggattcattcctttgcaacgagtgtggctacagcaagtatgggaggtttgagtttaacttcatggcaaaaccaagcttcatatttgataatatggaaaatgacgaagatatgaagaagggattggctgctatagagtctgagtctgaaaacgctcacaagagatatcagcaactactgggattcaagaagccgcttctgaagatagtttcaagcattggtgaaactgaaatggattcgcagcacaaggacactgtccagcaaatgatggcatctttacctggtccatcatgcaagataaaccgcaaaatcgcacttttgggcgtactgtatggtgagaagtgcaaagctgcttttgattctgtcagcaaaagtgtacaaacactgcaggggcttcgtagagttttgatgagctacctccatcagaaaaattcaaatttttcatcaggtgcctcaagatgtgtggtctcaaagaccccaaacaattgttatggttgtgcaactacatttgtcactcaatgtcttgagattcttcaagtgctgtcgaagcatccaagatctagaaaacaacttgttgcagctggtattttgtctgagttgtttgaaaacaatattcaccaaggtccgaaaacagcccgtgctcaagctagagcagctctttctactttctcggagggtgatctgagtgcagtgaatgagttaaacaatctggtacagaagaaaataatgtactgccttgaacaccatcgttccatggatattgcgctcgccactcgtgaggaaatgttgttgctttcagaagtttgctctctcactgatgaattctgggagtcaagactgcgccttgtttttcagctactattttcatccattaaattgggtgctaaacatcctgctatatcagagcacataattcttccttgccttaagattatttctgtggcatgtacacctccaaaaccagatacggcagagaaagagcaaacgatgggaaaatctgctcctgcagtgcaagaaaaggatgagaatgctgctggcgtcataaagtattcatcagaaagcgaagaaaataacctgaatgtatctcagaagacgcgagatattcagcttgtgagttatttggaatgggagaaaggggcatcatatctcgactttgtgaggaggcaatacaaagcctctcagtcaattagaggtgcgagccaaaagtctagaacccacagatcagatttcttggcacttaaatatacacttaggtggaagcgacggtctagcaggacatctaaaggtggtttacaggcatttgagctcgggtcgtgggtcacagagcttattcttagtgcatgttctcaatctatcaggtcggagatgtgcacattgattagtttactcgctgcccaaagctcacctaggcgctacaggctgattaatttgctgataggcttgcttcccgctacgcttgcagcgggtgaaagtagcgcagaatactttgagctactcttcaaaatgattgagacacaagatgcacttcttttcttaactgtccggggttgtctgacaacaatctgtaaattgatctcccaagaggtgggaaacattgaatctctagaaaggagtcttcagattgacatttcacagggatttaccctccacaagctcttagaactccttggaaagttcttagaggttccaaatattcgttccagattcatgagagacaatttactgtctcatgttctggaggccctcattgtaattcgtggcttgatagtgcaaaagacaaagcttataaatgattgcaacagacgcctaaaagatcttcttgacggacttctgcttgaaagcagtgaaaataaacgtcaatttatccgtgcctgtgtttctggactgcaaacccatgcagaggagaacaaaggacgtacctgtttgtttattcttgagcaactttgtaatctgatctgcccgtcaaaacctgaggctgtgtatatgctgatcttgaacaaatcacacacgcaagaggagtttatccggggatcaatgacaaaaaatccatattcgagtgctgagattggcccactgatgcgggatgtgaaaaacaagatttgtcagcagttggacctgctaggtctactggaagatgactatggcatggagttgcttgtagcaggaaacatcatttcactagacctgagcatagctcaagtttatgagctagtttggaagaaatcaaatcaggattgccctcccatgacggtgacatacagacttcaggggttagatggtgaagctactgagcctatgatcaaggaattggaagaagatagagaagaatcacaagatccagagattgagtttgcaatagcaggtgcagttcgagaatatggtggtctggaaattttacttgatatgatcaagagtttacaagatgacttcaaatccaaccaagaagagatggttgcagttcttgatctcctaaaccattgctgcaagattagagagaacaggcgagctctactcaggctaggggctttaagcttacttcttgaaacagctaggagggcattttctgtggatgctatggagccagctgaaggcatactcttaattgtcgagagtttgacgcttgaagcaaatgaaagtgacagcatcagtgccgcacaaagtgctttgactgtcagtaacgaggaaactggaacttgggaacaggccaaaaaaatagtgcttatgttcttagaaaggctaagccatccttcagggcttaaaaagtcaaacaaacagcaaaggaacacggagatggttgctagaatcttaccttacttaacatacggtgagcctgcagcgatggaagcactcatagagcattttagcccttacctgcaaaactggtctgaatttgatcagcttcagcaacgtcatgaggaggaccccaaggatgacagcattgctcagcaagcggcgaagcagaggtttactgtggagaattttgtaagagtgtcagaatctctcaagacaagttcatgtggagagaggttaaaagacatagttttggagaatggtatcatagctgttgctgtcaaacacataaaggaaatttttgcaatcacgggacagactgggttcaaatctagcaaggaatggcttttggctcttaaacttccgtcagtgcctcttattttgtcaatgctaagaggattgtcgatgggtcatttgcctacccaaacatgcatagacgagggaggaattttaaccctacttcatgccttagaaggagtctctggagaaaacgacatcggtgcaagggctgaaaatttgctagatacacttgccgataaagaaggaaaaggagatggatttcttggagagaaagtccgtgcattacgagatgccaccaaagatgaaatgagacgccgtgcattaagaaagagagaggagctcctgcagggacttggaatgcgtcaagagctatcttctgatggtggtgaaaggattgtggtttctcaaccaattcttgaaggttttgaggatgtagaggaagaagaagatggattggcttgcatggtgtgtagagaaggctacaagctcagaccttctgatttattaggagtctactcttacagcaaacgggtgaatctcggtgttggcaattctggaagcgcacgtggtgaatgcgtttacactacagtgagctacttcaacataattcattttcaatgtcatcaagaggcaaaaagagccgacgctgctcttaaaaatccgaagaaagaatgggaaggagctatgttgcgtaacaatgaatctctttgcaactctctcttccctgtcaagggtccctcagttcccttagcacagtatcttcgttacgttgaccagtactgggataatctcaatgctcttggtcgagccgacggaagcagactccgtctattgacgtacgacattgtcctgatgctggctcggtttgcaacaggagcttcttttagcgcggattgccgaggtggaggaagagatagcaattcccgtttcttgcctttcatgttccaaatggcccgtcatcttctcgaccaaggaggccccgtgcaacgcacaaacatggctagatctgtttcatcgtacatttcatcatcatcgacatctacagcaacagcgccatcctcggactcgcgacctttaactcctggatcccagctatcatcaactggaacagaggaaacggttcagttcatgatggtaaactcgcttctatcagaatcatatgaatcatggctccaacaccgtagggtctttctccagcgggggatttaccatactttcatgcaacacgctcacggtcgggtagcttctcgcgctgcagaaccaaccagttcaggaggcaaaacccaagacgcagaaaccttaaccggcgatgaacttctctctatcgtcaaaccaatgctggtctacaccggtatgatcgaacagcttcaacagttgttcaaacccaagaaaccggtccacatcgaaccaatcaagaaagaaggtacatcaagtggagtagagcttgagccatgggagattgtaatgaaagagaagctgctgaatgtgaaagaaatgattggtttctccaaggaattgatctcgtggctcgacgaaatcaactctgcaactgatctacaagaagcatttgatattgtcggcgttttggctgatgttttgtctgaaggagttacacagtgtgatcagtttgtgagatcggcgatcgataaagattga
